United States Patent Application Publication US 2026/0109938 A1 - sequence listing, part 10

SEQ ID NO: 5 - DNA, 3977487 bp, Escherichia coli (residues 1,988,745-3,977,487 of 3,977,487)
  source 1..3977487: mol_type = genomic DNA
gccgtaatggtctgggtgatttggggcgtgatcgttaatgcctggtttattccagaaattgccagccagttcttcaccatgggtctggtgattggcatcatcggcgttgttttccgccttaacggcatgacggttaataccatggctagttcctttaccgaaggggcgcgaatgatgatcgcccctgccctgctggtgggtttcgccaaagggattttgctgctggtcggtaatggtgaagcgggtgatgccagcgtgttaaataccatcctcaacagcattgccaatgccattagcggtctggacaacgcggtcgcggcctggtttatgttgctcttccaggcggtatttaatttcttcgtgacgtccggttctggtcaggcggcgttaaccatgccgttactggcaccgcttggcgatctggtcggtgttaaccgtcaggttaccgtgctggcgttccagtttggtgatggcttcagtcacatcatttacccaaccagtgcgagcttaatggcaacgctcggtgtgtgcagggtggacttccgtaactggctgaaggtgggcgcgaccctacttggactgctgtttattatgtccagcgtcgtagtgatcggcgctcagttgatgggctaccactaaaaatgttaagagccgcaattgcggctcttttttcattctgccgtttcagtctctacggcttcatttttggcattgcgcttcatccacaacgctagcgctttcaggctgtctggagtgaactcatcgcagcgtgcggtgatttcttccggcgtcagccagcaaacttcactgacttcatcttcctgtagtgcgaagggaccgtgagagacgcagctgaacaatgcgccccagacacggcaatttttatcttcgaaatagaactgcccgtgctcggcaaaggggacaccggcaatgcccaactcttcttccgcttcgcgacgcgcggattccagcagttgctcatcggcctggactacaccgcctgcggtcgcatctaacatgccgggtaaaaagtcttttgtctcggtacgacgctggaccagaattttgcccatgccatcatgcacgacgatgtaagttgcacgatgacgcagacactgtgcccgcatttgttcccggctggcttgtgcaatgacttcgttctcttcattgacaatatccacccattcagtacttgccaaacgacgctgttccattatcaggaaaccttctttttctggcgctcttacggcgcattttgagttgtgggtaaattacggattaatcgcgacctgcgcaatgatactttgatcattgagtgcgattacactaagtacgtcattatccagcatgccataactcgccggattaccgcctttcggaatactcacgctgccggggttgaagtggaaaatctccccccgctgttctgccactggcagatgggtatgaccgtacaccagcacatcgttctggtttaaagcaggcagattttccgggccaaaaagatgaccatgcgtcaaaaacagacgttgtttttccagtaatacctgttgccacggcgcggttatcgggaaatgcagcagcatttgatccacttcgctgtcgcagttgccgcgcacagcgataaccttatgtgccacttcattaagccgttcagcgactttggctggcgcgtaaccctccggtaaagcattacgcgggccgtgattcaacacgtcgccaaggatcaccagccactgggcaccgctttgggcaaacaactccagaacacgttccgtcgccggtaagctcccatgaatgtcgcttgcaaacatcagtttcatcactcactcctcgtcgaaaaaacgtaagctatgatactggattctgtcgttgctatcagccagattgcttcgcgctaagtgcaataaaacgctggacagacgctcgctgccactggaatgttgcataatccaccaggcgttctggcacctcatcgccatgtagtaccaggcggttaatcattagcgccagatcagtatcagcaatgcaccattcaccaaataaattcggctgacccagtactaacaaatgttctgccatcgcgaacagtttctctgcactggcttttccctcggccgttagtggcgcttttttcgcccccgcaaagacaacatccgtcggacgctcttcgcggatgggcatcagatcgctgcgcagccaggcctgaatctgtcgtgcacgcgcacgattttctaaatcaagcggataaatacgttcccaggtcggtgacgcaaatcgatcttccagatactccgcaatggcagaagattcactcaactcaaaatcatcgatttgtaataacggcacacggcgtgtctgaccgtaaccttgccacgtcggctgcaaatgttcaccgctgtcgaggtcgatggtcttgatatgaaagctcaggcctttttcctgcaacgccacccaggcggataacacataaggggagaaaaagtgggcatcactccaaagcgtgatagcgggtttactcattatgtcctcggcaataaagggggctggctatcaaactatagagcctttttgtcactgtcacgtgacgaatactcacgtaagtcgccgcgctttctatacttgtggtgttcagatgattaaacaaccggagctgcaatgatcgatctctatttcgccccgacacccaatggtcacaaaattacgctgtttctcgaagaagcagagctggattatcgcttgattaaggtagacctggggaaaggcggtcagtttcgtccggaatttttgcgcattagccccaacaacaaaattccggcaattgttgatcattctcctgccgatggcggcgaaccgctaagcctctttgagtctggtgccattttgttgtatctggctgagaaaacaggactctttttgagtcatgaaacgcgtgagcgcgccgccacattacagtggttattctggcaggtaggcggactggggccgatgcttgggcaaaatcatcattttaatcacgcagccccccaaaccattccttacgctattgaacgttatcaggttgaaactcagcgtctttaccatgtactgaacaagcggctggaaaacagcccctggctgggaggcgagaactacagcattgcggatattgcctgctggccgtgggttaatgcctggactcgccagcgaattgacctagcaatgtatccggcagtcaagaactggcatgagcggatccgtagccgccctgccaccgggcaggcactgctaaaagcacaactcggtgatgagcgtagcgatagttaacagaaacaggttctcgtgtattatttcatcctaagtaaaacaacggagaacctgcaatggcacaacctgccgctattattcgtataaagaaccttcgtttgcgtacgtttatcggaattaaggaagaagaaattaacaaccgtcaggatattgttatcaatgtgacgatccactaccccgccgataaagcgcgcactagcgaagatatcaacgatgcgctgaattatcgcaccgtaacgaaaaacattattcagcatgtagagaataaccgtttctctttgctggaaaaattaactcaggatgtgctcgatatcgcacgtgaacatcactgggtgacgtatgctgaagtggagatcgataaactgcacgcgctgcgctacgccgatagcgtatccatgaccttaagctggcagcgttaatcgccatatcgggaggctgcatgaacatagtgatcaccggagggacaggattaattggtcgccatttgattccgcgtttgctggagctgggccatcaaattacggtagtgacgcgtaacccgcagaaagccagttccgttctcggccctcgggtgacactatggcaagggcttgccgatcaaagcaacctcaacggcgttgatgcggtaatcaacctggccggagaaccgattgctgataaacgctggactcacgagcaaaaagagcgtctctgccaaagccgctggaatatcacgcaaaaactggtcgatttgattaatgccagcgacacgccaccgagcgtactcatttccggcagcgcaacgggctattatggtgacttaggtgaagtggtggttaccgaagaggaaccgccgcataacgaatttacccataaactctgcgctcgctgggaagaaattgcctgccgggcgcaaagtgacaaaacgcgagtgtgcctgctgcgtaccggtgtagtgctggcaccggatggcggtattctcggtaaaatgctgccgccgtttcgtcttggcctgggcgggccgattggctctggtcggcagtatctggcctggattcatattgatgatatggtcaacggtattctctggctgctggataacgagctgcgcgggccatttaatatggttagcccctacccggtacgcaatgaacaatttgcccatgcgctcggtcatgcgctgcatcgcccggccattttgcgcgtccccgcgaccgccattcgactgttaatgggcgaatctagtgtactggtattaggtggacaacgcgcgctgcctaaacggctggaagaagcgggttttgcgtttcgctggtacgatttagaagaggcgctggcggatgtcgttcgctgatgtggtttacagcaaacatccgccagttaactcccggtgttacaggattagtggctttgcgcgataagatcgtctggactaagtcgggtcaccatcataactaactctctgtctaaacctctatccagcatctcctgagcaatacgcagggcttcttcgtgtttgccctgcattgcgccttcttcacgtaatctgtcagcaatggtcatcagtttctccttttcttgtggtgcgcgttccgctatctcaccaataaatgcacgaaaacgctgggcatcccctgtttgtaatacgtaattaaacagggcttttagctgtctgtcattagtgttccctgtaactagcaggctaacaatttggtcgactaatcccaacagatcgcgctgacgaatatgtttctgaattaactccaacagcgccattttgcggtgttgcataatctcgtcatccggcaccacggtaatatccaccaacggaaaagcgctactatatattttgcgggctatagcaggctcggcaaattcatcaagccagcagagactataaggataaggacttctgcaaccatgataaaacagcatcgggagcaccaatggaagctctttatagcccgcatcaagatggttttgcattgccgcaatggaataacgcatcatgcgaaaagccattaattcttccggcttactttggtgctctatcactacataaatataacccactccctcctgcgttttcacagaccacaagaggtcggaataatattgccgcaggtcttcatcaataaaactgtttggttccagtttaagcgtcgttaaatcacacagtttgcgcagcggcgcgggaagatgaatatcaataaaatcccgcgcggtgtctggatggcgtaaaaaagatttaaataccgcatcatgcggcgtggaagttgtgcttattgtcatggcgttccgtcacccctcaaatttaagatgacgcgacaataaccacgattaacacccaatgcagcaggcagtttttatctttggacagcgaattcagaagtatttttagcggactgtaacttttacatttcagcggaagctgactcgcaaattccccatgaaaatactccggcagcgttagccaccggagaggaaattatttcaggcttcccttaaggaaccgttgcagacgagggctttgcgggttgccaaataactgctccggcgcgccctcttcttctattttcccctgatggaggaaaatgacatgagtagaaacatggcgagcaaagcccatttcgtgagtcactaccaccatggttttcccctcttctgccagttgctgcataatacgcaacacttcgcctaccagttcaggatcgagcgcgctggtaggttcatcaaacagtaaaacttccggttccatcgccagcgcccgcgcgatagaaacacgctgttgctgaccgccggaaagatgcaccggatatttcccctgcgcacgttcgtctatcccgacttttgccagatacttcaccgcccgctcgcgcgcttcctgcttgctcaggcccaacacctgaatcggcgcttccatgacgttttccagcaccgtcatatggctccagagattgaagtgctggaataccatcgtcaggcgtgtgcgcagtaagcgcagttgatttttatcggcgactttgagttgaccgtctttgtcgcgcaccagattgatcgtctggccattgaccacgatgctcccttcactcggtttttcgaggaagttaatgcagcgcagaaaggtacttttcccgcttccgctgcttccgatgatgcttattacatctccggcattcgcttgcagacttacccctttcagcacttcatgttcgccgtagcgtttgtgcaaatcgataacgtttaatttattctcggacatcgtattctcagtgcgtactagaaggtttcacatgctgcaaccagcgtttttccgctctgcgaaagaggctgatcaggacataagagatgattaaatagagcaccgcggcaatgccgaaggcggtaaaaggttgatacgtggcggcgttaatatcgcgggctattttcagcagatccggcaccgtggcagtaaatgccaacgcagtagagtgcagcatcaggatcacttcgttgctgtatgccggtaacgcaatacgcagcgcagaaggcaaaataatgcagcgatacattttaaaagtgctgaagccataggctctggcggcttcaatttccccatgcggaacgctacggattgccccagcaaaaatctcggtagtgtaagcgcaggtgttaagcgtcagcgccagcacggtacagttcaggccactgcggaagaaagcgttaaggaattcggttcccttaacaatctcaagcgtgtacatgccggaatagaacaccagcaactgaacatacagcggcgtaccgcgaaaaatataggtaaataaccagattggaaactggatgtatttattactggagacacgaccaatcgccagaaacagcgccaggactccgcctatcactacgctcaaaataagcagccacagagtgatcgccacaccagtaaagcgataaccgtcggtccacagcagcggtttccagtattcatgtaagatttcgatcacaggtcagccctcttcacacccacggagtagcggcgctcaaggaacagcagcacaccattggaaacagtggtgaaaaccaggtaaatcacgccacagacgatggcgaaatagaacggttcccaggtacttttgcctgccagttgggtggctttgaccacatcttccaggccgagtaagctaaccagtgcggtagatttgaggatcacctgccagttgttgccaatgcctggcagggcgtaacgcatcatgctcggaaacatgatccgccgaaacacttgcccacgagtaaaaccgaacgccgtcgccgcctctatatgtcctttcggcactgccataaaagcaccacggaacgtttcggtaaaataagcaccgtagataaaaccgagagtgataataccagcgaccatcggatcgatatcaatctgcccgacgcccatcgcctccgtcaccgtgtttagcgcaatctgcaaaccgtagaaaatcagcagcatcaacactaagtccggcacgccacgaatcagcgtggtgtacccttcgaaaatcagcccgctaagccgattttggctgagcttaccgccagcgccaattaaaccgatgattacagcgagcactacagagctgatagccagctccagcgtgacgagcgcaccctgtaaaataacaccactaaacccatacaacatgctgcctgtcctgtcgtgtgtggtgaattaccgcctcttgtctccctccggttacccgaagggagcgggctttctttcaccgatggcgattagccaccataaacatcaaaatcgaagtactttttcgctaatttctcgtaagtaccgtcagcgcgcatttcggcaaaggctttgttcagtgcttcgcgcagttcgttatcttctttacgcaggcccatgccggtccctacgccaaacagtttttcatctttaacagacgggccaccgaatttgtaatctttaccgacaggttgtttgaggaaaccttcgctggcagcgacctcatcctggaacgcggcatcaatacgtccggcagtcaggtcagaataaatgttgtcctgcccctgatagctgacgatttcaatgccttttggtgcccaatgttcattaccgaacgtctcctgggtggtgccctgcaatacgcctacccgtttgcctttcaggctctcgactgtcggctgaatgtcagaatttttcgccaccaccaaacgagaatcggcagcgtacagtttgtcggtgaaggctatttcttgctgacgtttttccgtaatggaaaggctactcatgatggcgtcaatcttcttcgcttttaaggacgggattaacgcatccagcggattttcgacaaacgtacattgcgtattgatgcgtttgcataattcctttgccagatcgatatcgaagccaaccagttcgccttgactatttttactttcaaatggcgcataggtcgggtcggtaccgatgcggatgttttgcggaatcgcagcaaacgccgcagttgcgctggagaaggccagaaccagagagaggcttagcaccagttttttcataatgtcctcaactgacagtctttttatagggaatatttacaggtttgttacacttatcgtgccataaaattgaccatcaaggcaaaatatcccgccccgttagacgtattatttttcattaaaaatgcttaagtatgcatttcaatgcaccacgatagtgcaacaaacctggcgtgcaccatgatgatcattccatcaggtacagcttcccagcgacgtatcagtcaccgtagacattaaagtcgaaatactttttcgccatcttgtcgtaggtgccgtcctgacgcagctcgccaagcgccttattgaaggcagccgtcagttcagcatcatctttacgtagccctacaccggtgccatcaccgaagtattttttgtcttttacactactgccagcaaaggcgaaatctttaccagcaggttgcttgaggaatccttcgctggcagcaacttcatcttgtaacgcagcatccagacgtcctgcagccagatcggaatagaccaaatcctggttggcataggccaccacatccacgcctttactacgccaggtctcgttagcgtaagcttcctgggtacttccctgcagcacaccaacatgtttacctttcagactatccagcgttggctgaatcggactacctttggccgcaatcaaacgagaatctgcggcgtacagcttgtcggagaaggcaatctcctgctgacgtttatcggtaatggaaaggctgctaataatagcgtcgatttttttcgctttcagactggggatcagcgcgtcaaagtcactggcaacccaggtacatttcacctgcatccgtttgcacatctcgttaccgagatcgatatcaaagccaacaaaatcacctttagcatctttgctactgaacggtgcgtaggtggtatcggttccgatacgtaccgtctccggtagcgccgcatagctggaagccgctgtggagagaccgactaacaaagacagagcgagaatgctcttcttcatacataaccctcaagtgaaaatggcttttttatgttgtgtattgtgttgtgtgtttgcaggctctttcatgcaggtcttatgccatcttgacgacaacagtaacattcaacgttaaatatgttaataagacgttgcattattgtcctgaagttgaagatagcaggtatagcggttgaatcgcagcgtttcgattgaatggcagaaacaaaatgtcgaggatttgatcgcggttgcaaaattgccctgaaacagggcaacagcggagttatgcgccctgccagcgggcaaagagatcttcaggaagggttatcgcaaactggtcaagaacacgattaaccgtctgatttatcacatcatcaagggattgcgggcgatgataaaacgccggaacgggaggcataatcaccgcaccgatttctgccgcctgagtcattaaacgcagatggcctaagtgcaatggtgtttcacgcacgcagagcaccaacgggcgacgctctttcagcaccacatctgccgcacgggtcagtaagccatcagtatagctatggacaatgccggaaagggttttgatactacagggtaaaatcaccatccccagcgtctggaaagaaccggaagagatgctggcggcaatatcgcgcgcatcgtgcgtgacatcggctaatgcctgcacttcgcgcagagaaaaatccgtttcgagggataaggtctggcgcgctgcctggctcatcaccagatgcgtttcgatatctgtgacatcgcgcagaacctgtaataagcgcacgccataaatcgcgccgctggcaccgctgatgcctacaatgagtcgtttcataaatagttgccctgtcagacttgcaggcagactttgcaggatttcggcgggagttgcaagtcagggtgccagaccggcaccctcagcgaaggcatcatccttcgttatgcatttcgagattttccacttcgttctgacgttgcactgctttggcgtcatcattacgtaacgtatcgaggaaatcgaggtagccctgatcaacatctttggtgacgtagacgccgttgaacacgctgcattcaaactgctggatatccggattttcagcgcgaacggcgtcgatcagatcgttcagatcctggaaaatcaacccgtcagcaccgatgatctggcgaatttcatcaacttcgcgaccgtgagcgatcagttccgtggcgctcggcatatcaataccataaacgttcgggaagcgaatttccggtgccgcagaagcgaggtacactttcttcgctccggcttcgcgtgccatctcgataatctgctcagaagtggtgccacggacgatggagtcgtcgaccagcaggacgtttttatcgcggaactcggcgcggttggcattcagtttacggcgcacggacttacgacgcagctgctggcccggcatgataaaggtgcggccaacatagcggtttttaacgaagccctggcggtacggtttgcccagaatacgagcaatttccagcgcgatatcacagctggtttctgggatcgggatcaccacgtcgatatccagatcttcccattcgcgggcaattttctcgcccagtttcgtgcccatattcacacgcgcgctgtaaacggaaattttgtcgataaagctgtccgggcgggcaaagtatacatactcaaacaggcacggattgctgaccggattgtcagcacattgacgggtaaacaactgcccttcttcagtgatgtaaatcgcttcgcccggcgcgacgtcacgcaggaaatcaaagcccagcgtatcgagcgctacgctttcggaagcgaccatatattctgtacggttctcgtcaatatcacgttttcccagtaccagcggacgaatcccgtttggatcgcggaaagcaaccataccgtggccgataatcatcgccacacaggcatacgcgccgcggattaagcggtttgtggcagcaatggcagcgaaaatattgtcggcttccagcgggtagtggcggaagttgtccagctcgctggcgaagatattaagcagaatttcgctgtcggaagtggtgttgatgtggcggcgtttttcttcaaacagttttttacgcaactcgtgagcgttggtcagattgccgttgtgggcaagcgtaatgccatacggggagttaacgtaaaacggctgcgcttcagaggcgctggagctgccagccgtggggtaacgcacatgaccaatgcccatattgccctgcaaacgctgcatatggcgagcttcaaatacatcgctcaccagcccgttcgctttacgcaaacggaagcagttattggcatctatggtgatgatgccggcggcatcctgaccgcgatgctgaagcaccgttaaggcatcataaatgctctggttaaccggcataacaccggcgataccgacaataccgcacatacgtctttttcctcgttaagccacatctcagagcacttacgctctgggcaagaaactactgctgctttgcagataatcaaaaaaacatctgatgataaaactgaattgcgggatcagctgacttttgctccagtcttcgcttttgctcaccccggtaaaggagtcgagaaagaagagaatggcagcaacaatcaacacaccgcgcaacgcaccgaaacagacgcccagcacccgatcggtgccactcaaccccgttttctccaccaactggcctatcacgaagttcacgatagcaccaacgatcagggtagcgataaacagtaccgcgatggcaatcccatttcgaaccagttcgtcttcaaagcccgtaaaccagacactcaggtaagtgtagtaatgactggcaacaaagaaagcacaaccccatgtcaccaggcttaacgcttcacgaacaaagccgcggatcaggctaaccagagaggaaaaagcaatcaccgcgattatggcgtaatcaatccagaccatatgtgtcccacgattttacgccctgtcatcctgttcggggcgcattctaacagaaaaagaaaacgtttgcgtagggatttccttcccgcgcatcaataaaaatggcgctgaaaaaatattcaacgccatcgactttttatgcctttgcggcatcgggcaatgcgtgtcggatgcggcgtaaacgccttatccgacctacggttctacccctgcgtaggcctgataagacgcgccagcgtcgcatcaggcaagaccgtattaattcggcgtatagcccattaccacgccacttaagccagaaagttgcttcaactcacccaggctacctttcagcttatctttgctggcatccggcccaaccagaatacgggtaattttaccctgcactggcgtggatgggctcgtataaacccgataaccggcaccgcgcagcttaccgacaatctcattcactttatcggcatttttcagcgcacccagttgcacaacataggctttacccgtcggtgcagctttttcttccacgaccggcttcggttctggcttcggcgcaggtggtgcttcaacctttggtttaggcggctccaccggtttcggcttcggtggggcgaccggtgcaggttccggttcaaactcggtgttattggctgcaatagtggccggatcgaggctcggtgctgcggcatcacctgcccgcacctcttccgctgcgccttccggcggctgcgtcggtaacgcctgggtggcggctggcatcatatcaggctcatcacgatcgcccgctttcggcaccagcgggatagccgcgaactcatcctgataatgttttttctgcccgtccagcagccctggaagtacaatcacccccagcgccaccagcacgatcgtgcccactaaccgattctgaaacttacttgccaccgcttctcctcgcgtcaatcacttccatgacatgtgcgaccgtgtggaaagaaccacacaccagcacggtgtcttccgctttagcgtccgccattgcggcatcccatgcctgcgcaacgctatcaaaacttttgccgttacccaaatgctcaagcagttgttctgccgtggcaccgcgcggcccttccagtggcgcacaataccagtcatcaaccacgcttttcaaccaggccagagttccggcaatatctttatcatgtagcataccgataaccgccagcacgcgcccgtttttcggtagcgctttcatacgcccggtgagatattccgccgcatgtggattatgcgcgacatcaaaaataacgcgtgggctctcgctcacaatctggaaacgtcccggcaaaattgcgctggcaatcccgtcgcgaatggcattttcactgacttccagcccgctggcacgcagtgccgccagcgctgttgcggcattcggttgcgggacaagcggcaacggcagattttccagcgtgccgtgagcatcgctaaacgcccagtcatgatcggtgacggaatagttccactcaacgccccgacgttgtaacagtgcacctttttcctgcgccacatcagcaatggtagaaggcatttccggctcaccgacaattgccggtttttcgctgcggaagatgcctgctttctcgcgaccaatactttcgcgatctggacccagccagtcggtatgatccagcgcaatactggttactaccgcgacatcggcgtcgacaatattggttgcgtccagacgaccgcccagccctacttccagaatcaccacgtcaagttgtgcctgcttgaacagccacaacgcgctcagcgtaccgtactcgaaataggtcagggaaatatcaccgcgtgcgctttcaatctccgcaaaagaggcggtgtgggcgctttccggcaattcctggccctgcacacgtacgcgctcggtataacgcaccagatgagggctactgtagacgcccactttgtaccctgccgccatcagaatgctctccagcgtacggcaggtggtgcctttgccattcgtacccgcaacggtaaacacaaatggcgctggtttcaggacgccaagacgcgccgcgaccaggctcacgcgctcaaggccgagatcgatagttttactgtgcaggttttccagataagaaagccagctagccagagggctcgcggcttgaggagtgcgtttgataatcatggtatccgctgattcgttacggtgagaatagcaaaagggcagagccagtggccctgcccttatcagttatcaggcctcaggttcctgatccggtaccgggggtaccactacgccttcacgcggcgcttcaggattcggcgctggcagattcatcaacttcgccagaatgctcgccagtttcaggcgcatttccggacgacggacgatcatgtcgatcgcgcctttctcgatcaggaattcactgcgctggaatccaggcggcagtttttcgcgaacggtctgttcgataacacgcggaccggcaaagccgattaacgctttcggttcagcgatgttgagatcgcccagcatggcgaaacttgcagaaacaccgcccatcgtcgggtcggtcagcacggagatgtacggcaagccgcgctcctgcatttttgccagtgccgcagaggttttcgccatctgcatcaggctcatcagtgcttcctgcatacgtgcgccaccagaggcggagaagcagatcagcgggcagttatcttccagcgcctgctcaacggcacgcacgaaacgtgcacccacaacagaccccatactaccgcccataaaggcgaactcgaatgccgcagcgacaaccggcattccatacagagtgcctttcatcaccaccagcgcatctttttcgccggtttctttctgcgcagatgccagacggtctttatacttcttggagtcacgaaacttcagcacatctttcggctcaagctcgctacccagctccacaaggcttccttcatctaacaggctatgcaggcgattacgcgctgtcatacgcatgtgatggtcacacttcggacagacctcaagattacgttccagctcagcgcggtataaaacctgaccgcagctatcacacttagtccacaccccttcaggaatgctcgccttgcgggtgggagtaatgttgcttttaattcgttcaatccagctcattagggacctttctgtctgaacctggttcgatgccagttttatctttggggacgcataatgccatttttgcccccaacagaccatgaatgttgcacattaaaacataacagcccgaaactttggataaaaaagtggtcgaaccgcggagttactttttattttgcggcgcgtgccgcagcgcgtttgtgacggattatttcgatgacgcccggcaaaatagaaaccacaataatcccgacgatcagcagcttaaggttatcctgaaccatcgggattgtaccgaagaaatagcctgcgtaggtaaaaagcagtacccacaacagtgcgccgatcacgttataagcggcgaaatgacggtagctcatgtggcccattcccgcaacaaacggggcgaacgttctgacgatcggcacaaaacgggcgagaataatcgttttgccgccatgtttctcataaaactgatgggttttgtcgagataactgcgacggaaaattttgctattgggattactgaacaacttttcaccgaacaaccgcccgatagtgtaattgaccgcgtcacccacaatcgcggcgatcagcatcagcaccaccatcatatggacgttgagatcgttggtttccagacttgccaacgctccggcaacaaacagcaaactatcacccggtaaaaacggcgttaccaccagaccggtttcacagaacaaaattaagaacaaaatggcataaacccagacgccgtactccgcgaccagctctgccagatgcacgtcaatgtgcaggataaaatcgatgaggaaataaatcaggtccatatttgcctatgccttgtactcgtcatctttcaggctgtaactacgttggctacagcctgaaatgttccgagcattattctcgttagtccgccagaaatagcgggcccattggcggttttggaagatcataccggtcagggtaatccaccgcgaccagatacagcccttccgcttttgccgttgctgccgccagcgttctgtcctttgccgccagcaactctgctatccagctctccggctggttgtgggcaccgacttccatcaggctgccgacaatattcctgaccatatgatgtacaaaagcattcgctttaatatctaccaccacataaggaccgtgacgcgtgacattaatatgcataacgttgcgccacggggttcgggactggcactgcaccgcacggaagctggtgaaatcattctcgcccagcaagcattgcgcagcccgatgcatccgttcagcgtccagcggttcgtaaaaatgggttacccctttactcagtaccgccgggcgcagccgatgattgtagatgatgtagcgataacggcgagccgtggcgctaaatcgggcatgaaaatcatcaggtacagttttaacccaacgcacagcgatgtcaccaggtaaattcgcatttacgcccaaggtccacgccgcgtctttgcgcagcgcggttgtttcgaaatgcacaacctgcccggtaccgtgtacccctgcgtcagtacgcccggcgcagaagacggtgatgggttcgttcgccacctgggagagcgccttttccagcttctcctgcacactgcggacttcgttctgccgttgccagccgtaatacttactgccgtcgtactcaatgcccagcgcaattttataaactggcggttgttgctggtcggacattagtacagatactcctgcaccagtttctcggcgatttttactgccatcagcgcgccgccaaagcgaacgttatcggccacgctccagaactggacttgctccggcataccgtagtcattacgcacgcagccaacagaaagatgcggcgtaccgctagcatcacctacctgagttgggaattcgttctcttcagagagcacaatatcttcgccttgaacaaacgcatcacgcgcttcttctgctgccagtggacgcagagcttcaaagttgaccatctgggcatgaccgtagaataccggtgcctggacgacgctagcgctaatcatcagcccttcgtcctgcaggattttgcgtacttcgtcaacgatacgacgttcttcacgcacgctaccttcgctatccggcagtaacggcagcatgttgaacgccagctgacgcccgaagaaatcttcttcgtcaatcggaatgccgttgagcaatttcgcactctgccccgctaacgcatcgaccgcttttttgccctgggcggaggcactaatcaggctggtaacgctgatacgacttaaaccgccctgatcgattaacggtttcagtgccgccagcagctggctggtcagactgtctggtacggcgatgacattccggttccggtaatctgtcagtacaaacgggtttacttccggcaccaccagcggtacgtcgggttcgagagcaaacaatccactgctgtcgatcaccaggcaaccactgttggtcgcttcttcaacccaggcagcggtagcttctttgcctgcgacaaaaaatgccagctgcgcctgcgtccagtcgaattcagcggcatcctgcacggtgattgtcttaccaccaaagcgcagttgttcgcctgcgctttcgttacgtgccagtgcataaatttccccaaccgggaactgacgttcagccagcgtttcaagcagggcttcgcccacagcgccagttgcgcccaggacggcaatgttccagccttcagacatggtggtttactccagaaatagcaaagctccctgccaatgttacagcagagagcatgaagaagagattaacgtgccggatgatgaacggcgttaaaacccagtttacacagcaaacttgccgcactggcgtcatcacaaattacatacagagaactccattcacggcgctcaagatagtttttgcgcagtttatcgaactcacccggtatcccggcgactttacgcagcggtgcgtcatcgcggcgcacatcatacaccaaatgcaccagccttttcagcgtcggttgatcgagcgggccatgcagcgtaatgcgaccaaactctggcgcaggcagtaatgtatccagcgcaacgtgctgttcatgcccaataaacttgctataagcttcaaacacttgcgtagtaccgcgtgctttaccttccagggtatagcctgcgatatggctcgtgccgatatccacttttttcagcagctcgacgttgagttccggttcgccttcccagacatccagcactacgcttaacttctggccttcattcaggcaggtcagcaacgcagtattatcgacgactgcgccacggcaggcgttaatcagaatcgctccgggcttcaggctacggatcagtttttcatccgccagatgtagcgttttgtacggaccatctttaaagagtggcgtatggaaagtcagaatatccgcgcgctggactaactcatccaggctgcggaaatcaccctcatccccacggtcggcgcgaggcggatcgcaaagtaaggttttaatccctaacgcttccagtcgcgcctgcaatcgacgtccaacgttaccaacgcccacgatccccaccgtacggtcgtacagactaaatccatcgcgttcggcaagcatcagcagggaggagaaaacatattccaccaccgcaatcgcattacagccaggtgcagcggaaaaaccaattcccgcctgcttcaaccatgcttcatcgacatggtcggtccccgcagtggcagtgccaacaaatttaatgggttttcctgccagcaaagattcattcactttcgtgacgctacgcaccatcagcgcatccgcgtctgccagttgagcgacggggattggacgcccgggaaccgcggtcacctcacccaaacggctaaataagtcgcgggcataaggcatattttcatcaacaaggattttcacgtttgtgttacctgtatgagacgagagttaaccggacaagtgtgccataatctcgcggccaggcatacttgcgaagatttcaggtataaggatacgtaatgatacaacctatttccggccctcctcctgggcaaccaccaggtcagggagataatctgccgtctggcacgggcaatcagcctttatccagtcagcaacgtactagcctggaaagcttaatgacgaaagtgaccagtctgacgcaacagcaaagagcagaactgtgggcgggtatcaggcacgatattggtctgagcggagatagtccgctgcttagccgtcacttccctgccgctgagcataatctggcgcaacgtctgctggccgcgcaaaaaagccattctgcccgccagcttttagcgcaattaggggagtatttacgtctggggaataatcgtcaggcggtcacggattatatccgtcataactttggtcagacgccgctgaatcagctcagtccggagcaattaaaaaccattctcaccctgttgcaggaagggaagatggttattccgcaaccacagcagcgcgaggcgaccgaccgtcctttattaccggcggagcacaatgcgctaaaacagctggtgaccaaacttgcggcggcaacgggggaacccagcaaacagatctggcaaagcatgctggaactttccggggtgaaagatggcgagttaattccagcgaaactgtttaaccatctggtgacctggctacaggcgcgtcagacgctaagccagcaaaatacgccgacgctggaaagtctacagatgacgctaaaacaacctttagatgccagtgaactggcggcgttaagcgcatatatccagcaaaaatatggtctttctgcgcaaagtagcctttcttctgcccaggccgaggatattcttaatcagctttatcaacggcgggttaaagggattgatccgcgtgttatgcaaccgctgcttaatccttttccaccgatgatggacacgttgcaaaatatggcaacgcgtcccgcgctgtggatactgttagtcgcgattatcctgatgctggtctggctggttcgttaaccccgacgaaaactcagtatcgtgacaataatacccagcaccgcagagatcgccccggcaagaaatacgctagagtaaccaaacgtggtcgccagcattcccgccagcggcccggagacgccgagggcgatatcctgaaacgcggcgtaaccgcccagtgcggtgccgcgaacttgactggggacgcgtttaaccacctccacgcccagcgcaggaaagataaggctacatccggctccggttaacgccgcgcccgctaatgcgacccatgcacctggggcttgccagagcagcaacaagcccaccgtttctacaagcagagagacaatcgccactttcacgccgccaaaacggtccggcatccagccaaacatgacgcgcatcacgacaaatgcgccgccaaacgcggtaagagtaaagcccgccatcgcccatcctttgctggcaaagtagaggctaacgaaagtcccgataacagcaaaaccaacgccttgtagtgccagacctaaccctggtttccagataagcccgacaacgctccacaggcttggacgttctcccgccagggccggtactttgcgcactgtgccgttacaggcccacgccagtacgggtaataccattgtggtgatcgccagtgcggcaaaaccgtaatggctatgaatcaacaggccaagcggagcaccaacagcgagggcaccgtaaatcgccattccgttccaactcatcactttgccagagtgttttggccctacgatgcctagtccccaggtcagagcgcctgtcagtaactggctttcaccaaagccaagaatcaaacgcccgacgaccaacagagcaaatttgaacggtgcggagacaggcaaaatcgccgccagcagcaacgcgccgccagccagaccacaagctaacattccctgaagcgcgctacgttttgcaccatattgatcggccagtcgcccggcgtaaccacgcgtcagcaccgtagccagaaactgaatcccgacggcaatgccgaccatggtattgccatagcccagttcatgatgaacaaacagcgggataaccggcaacggcaaccctacggtcatgtaggtgagaaaaaccgcaaaagcgatgcggaagaggctaaaattggcagaagatcgtgtttcggtttggcttacagcagtcatgcattactccagaatgcagcgcaaggcgaggagtatccccgtctcatctctctggtttcagggttacggtgcgttggcaggatttaacgcgtacgtcttttcagaaggaaatcgacaaagcgggaagtttgcctggaactggcggcgattgtcaatgatgtgaaaaagggaaccatcaggttcccttttgcgttagtgccggaggccgcattggcgcgtaacgtcggatgcgacgctggcgcgtctactccgacctactgcgaattaatctttcagcttgcgcattaccagcgtggcgttggtgccgccgaagccgaagctgttagacataacggtggtcagttcgcgatcggtcgtttcggtcacgatgttcagacccgcagcctgctcgtccagctcttcaatgttgatgctcggggcgataaagccgtgttccagcatcagcagagagtagatagcttcctgtacgccagcagcgcccagagagtgaccggtcatggctttggttgcagaaatcgccgggctcttatcgccgaacacttcacggatagctgccagctctttcacgtcgccaaccggagtgctagtaccgtgggagttcaggtaatcgattggggtatcaacgccatgcatcgccatcttcatgcagcgtactgcgccttcgccagacggagcaaccatgtctgcaccatcagaggttgcgccgtagccaacgatttcagcatagatgtgagcaccacgcgccagcgcgtgttccagctcttcaaccactaccataccgccgccgccagcgataacgaaaccgtcacggtgagcgtcgtaagtacgggaggctttttccggggtgtcgttgtatttagtagacagcgcacccattgcgtcgaattcgcaagccatttcccagcacagctcttcgccgccgccagcaaacacgatgtcctgtttgcccagttggatctgctctactgcgttaccgatacagtgtgcggaagtcgcacacgcggagctgatggagtagttaacgccatgaattttaaacggggtggcgaggcaggcagaaacgccggatgccatcgctttggtgaccacatacgggccaaccgctttcaggccgcgcgggccgcgcattgcgtcagcgccgaacacctggaaacgcggggagccgccgccggaacctgcaatcaggccaacgcgcgggttattctggtaagcttccggagagaggcccgcatcagcgattgcctgctccatagaaaggaatgcataaatggatgcgtcgctcataaagcgcacaactttgcggtcaatgaggccagtggtatccagttttacgttgccccagacgtggctacgcatgccggaatccttcagctcctgagagaaagtgatcccactacgtccttcacgcagagatgccaggacttcctgctggttattaccgatgctggaaacaatgcccaggccagtaatcactgcacgtttcattcaatacctctgtaagtcgcacatagagtaagtttcgaatgcacaatagcgtacacttgtacgccgaacaagtccgatcagccatttaatagagaaatttgcgcagccttacacacatcgctaagatcgagccaccgcctgtaagacgagtaacttacgtgaaacactactccatacaacctgccaacctcgaatttaatgctgagggtacacctgtttcccgagattttgacgatgtctatttttccaacgataacgggctggaagagacgcgttatgtttttctgggaggcaaccaattagaggtacgctttcctgagcatccacatcctctgtttgtggtagcagagagcggcttcggcaccggattaaacttcctgacgctatggcaggcatttgatcagtttcgcgaagcgcatccgcaagcgcaattacaacgcttacatttcattagttttgagaaatttcccctcacccgtgcggatttagccttagcgcatcaacactggccggaactggctccgtgggcagaacaacttcaggcgcagtggccaatgcccttgcccggttgccatcgtttattgctcgatgaaggccgcgtgacgctggatttatggtttggcgatattaacgaactgaccagccaactggacgatagcctaaatcaaaaagtagatgcctggtttctggacggctttgcgccagcgaaaaacccggatatgtggacgcaaaatctgtttaacgccatggcaaggttggcgcgtccgggcggcacgctggcgacatttacgtctgccggttttgtccgccgcggtttgcaggacgccggattcacgatgcaaaaacgtaagggctttgggcgcaaacgggaaatgctttgcggggtgatggaacagacattaccgctcccctgctccgcgccgtggtttaaccgcacgggcagcagcaaacgggaagcggcgattatcggcggtggtattgccagcgcgttgttgagcctggcgctattacggcgcggctggcaggtaacgctttattgcgcggatgaggcccccgcactgggtgcttccggcaatcgccagggggcgctgtatccgttattaagcaaacacgatgaggcgctaaaccgctttttctctaatgcgtttacttttgctcgtcggttttacgaccaattacccgttaaatttgatcatgactggtgcggcgtcacgcagttaggctgggatgagaaaagccagcataaaatcgcacagatgttgagtatggatttacccgcagaactggctgtagccgttgaggcaaatgcggttgaacaaattacgggcgttgcgacaaattgcagcggcattacttatccgcaaggtggttggctgtgcccagcagaactgacccgtaatgtgctggaactggcgcaacagcagggtttgcagatttattatcaatatcagttacagaatttatcccgtaaggatgactgttggttgttgaattttgcaggagatcagcaagcaacacacagcgtagtggtactggcgaacgggcatcaaatcagccgattcagccaaacgagcactctcccggtgtatagcgttgccgggcaggtcagccatattccgacaacgccggaattggcagagctgaagcaggtgctgtgctatgacggttatctcacgccacaaaatccggcgaatcaacatcattgtattggtgccagttatcatcgcggcagcgaagatacggcgtacagtgaggacgatcagcagcagaatcgccagcggttgattgattgtttcccgcaggcacagtgggcaaaagaggttgatgtcagtgataaagaggcgcgctgcggtgtgcgttgtgccacccgcgatcatctgccaatggtaggcaatgttcccgattatgaggcaacactcgtggaatatgcgagcttggcggagcagaaagatgaggcggtaagcgcgccggtttttgacgatctctttatgtttgcggctttaggttctcgcggtttgtgttctgccccgctgtgtgccgagattctggcggcgcagatgagcgacgaaccgattccgatggatgccagtacgctggcggcgttaaacccgaatcggttatgggtgcggaaattgttgaagggtaaagcggttaaggcggggtaatctgctctcgcagtgtttgccggatgcggcgtgaacgccttatccgacctacgtgtgacgtgtaggcctgataagacgcgataagcgtcgcatcaggcatgctgctccagacgccgcaacttactgctgactcgcctgctgaaacaggttttcccacatatcggtcaccagcgcctggtcacgcgggctcaattcaccagcaccaatggctttttccagactctggctaacggtcgtatgcaccgcctgagcggagtggtcatcaccactttccagttctgcgatggctaatgtcaggtggccacgcaaatacccactggcaaacaactcatcatcactggcatggtcaaccataccgtcgattaatgccagaatgcgactttcaaactccgcgatcatcttctttcctcattgtaaaacgtggcgctggcttcagttgagcgcttccggccacgggaactgttccgccgtaagttccggcgtgtgataataattttgtagtgctttaatgaagcgtgccggacgttccggaatgccatttgtcagataatccatcacctgcgcatgtactcgccgttgaaacaccacacgatccggttcgaaatccccttccagattgtcgcaactgacgttaaacggatatcccgccgccacacagaacaaccagtcgagcgcctgcggcttcacttcaacatcttcaaactggctttgcgtttgggcatcgcgtccgtccgggcaataccagtagccgaaatcaaccagctcacggcgcgctttcccggcaatacaccagtggctaatctcatgaattgcgctggcataaaagccatgagcaaagacgattcggttatacggtacttccgcatcagcaggaagatagatcggttcgtcgtcgcctttaatcagacgggtattaaaatcatcggcaaagcagctattaaaaatttcaatcaactgctcgtagtggtgtgtactgttcattagttcatccccaaccagtggaggatctcctgtccgtggctgtcgtaaagtaatttggcactcatcaccgcgctgacgataacaatcatcgggcggatcagcttttgtcctttgctcaacaccagtcgactacccatgcgcgcgccgaggaactgccccaccagcatgacaaagcccgtcgcccaaatcactttgccgccgagaataaacagcagtaaaccgccgatgttactcgttgcgttgagtaatttggcgtgagccgtggctttggcgaggttaaatccgcacagcgtaacgaaggccagcgcgtaaaagctcccggcagccgggccaaagaatccatcataaaaaccgacgcagccaccggctattaacgcgaagggtaaaccgtacatccggcgctggcggtcttcttcacctagctttggcatcagcaagaaatagaggccgatacaaattaccagaatgggcaaaatctgccgtaagacatcagcctgaacgtattgcaccagcagtgcgccgctcatactgccgacaaaggtcatggcgatattgagtttctgatcgcttaaactaaccactttgcggcgaataaagtagatagtagcggaaatagagccgccgcaggcttgcagtttattggttgccagcgcattagcgggagacatccccgctgccatcaatgccggaatggtgagtaacccaccgccaccggcaatgctgtcgataaatcccgccagcatggcgacaaaaaagagaactcccagcaacagcggggaaaccataaacaggctattaaacgtttccattagatcacgtgctcatccagtagcgcctggcaggaaggcggcaacggaggcggtgtcttcttctcaggctttgttgttcccggttttggaggttcaaaccagctttgcagttctgccccgcaaccatcgccacttggcggtaaaggttgatcttcacactccagactatcggcagggcaacgtaatcgtacatgcatatgcgcgcgatgctggaaccagggtcgcactttgcgcaaccagtcgcgatcggtgcccgcatcaaggcaaagttgttgtttaatcgccggattaacaaaaatgcgcgtgacgtctttgtcctgggcggcgagtttgatcaagctgaaaatttctggcttccacagcgtggagacaacgtgtttaccgtcgcgggaaactaagtccagtgcttgcgggcgcaagagctgcgcggaggtccagcgagttttcggcagttgcagaaagatatcgacatccagtccggtctggtggctggcatgaccgccgttgaaacgcccaccagcgggcatccccatatcgccaatcagcaccgtacccatgcccagattgctcacctggctactcagacgctggataaacatcaccagatccgggtgaccgaaatagcgacgctgatcggtacgcatgacctgataatgttcggactgtatcggcagcgtgtcagcgccgacaatacagccattagaaaaactgcctatgctttgtgcgctacccggcacaggttgggttattttttgccacggcgtcgctgccaggctggcgctactggcaagcagagccagcagcgcaatcgcggttttattcattttttaccagcgtggaatatcagtcttcacatcggcattttgcgcccgttgccgtaacaggtgatccattaaaacgatcgccagcatcgcttctgcgatcggcactgcgcggatcccgacacagggatcgtgacggcctttggtgatcatctcaacttcttcgccaaagcggttaatggtacgacccggcacggtaatgctggaggtcggtttcagcgccatatgggcaatgatttgctgcccgctgctgataccgccgagaatgccgcccgcatggttgctctggaaaccgtctttggtgatttcatcgcggttctggctgccgcgcagcgccaccacgtcaaagccgtcgccaatttccacgcctttcaccgcgttgatgctcatcagcgcatgggcgatgtcagcatccaggcggtcaaagaccggctcgccaagtccggcaggaacgccactggcaacaacggtgactttagcgccgatggagtcgccctcttttttcagcgcacgcatcaactcgtctaacgcgtcgattttgtcggggtccgggcaaaaaaacggattttgctcgacctggctccagtctttgatatccagcggaatgtcgcccatctgggtcaggcagccacggatttcaataccaaatttctcggcgagatattttttggcaatagctcctgccgccacgcgcatggcggtttcgcgggcggaagaacgtccaccgccgcgataatcgcgcagaccgtatttttgttcgtaggtgtaatcggcatggcctggacggaaaacgtccttaatcgcactgtaatcctgagagcgctggtcagtgttttcgatcaacaagccaatgctggtgccggtagtaacgccttcaaaaacaccggagagaattttgacctgatccggctcgcggcgctgggtggtatagcggcttgtcccagggcgacgacggtcgaggtcatgttgcaggtccgcttccgtcagcggaatgcctggcggaacaccatcgacgatgcagccgagcgccagcccgtggctttcgccgaaggtggttacgcgaaagagttgtccaattgtgtttccagccatcacggctccgttattgttgtgtttgcgtgtttacttaatctttataaatcgcgaaatgttctcgtgcggcaataagctgctctttggtgagcataaacacaccatcgccgccgttatcaaactccagccaggtgaacggaacatccggatattgttccataagatgtaccatgctgttgccgacttcacaaatcaacacgccatcatcagcaaggtaatctgccgcgttaccgagaatgcgacgcgtcagtttcaggccgtcagtgccagatgccaggcccagttccggctcgtggcggtattcgtttggcaggtcggacatatcttccgcatcgacatacggcgggttagtgacaatcaggtcgtactgcactttcggcaagtcgcggaacagatcggaacgaatcggaatgacgttgtggatcagaccgtgttcttcgatgttctgttcagcaaccgccagcgcgtctggagagatatccaccgcgtcgacttctgcatccgggaaggcataagcacaggcaatggcgatgcagccgctaccagtacacatatctaaaatatgctgcggttgcttgctgataagtccggcaaatttattgttgatcagttcaccaatcgggctgcgcggcaccagcacgcgttcatcgacgtaaaattcatggccgcagaaccacgctttgttggtcaggtaagccaccggaatgcgttcattgacgcggcggatcacgcgttcaacaatacggtgtttttcgctggaggtcagacgcgcggtgcgcatatcttccggaatatccagcggcaggtagaggctaggcaacaccagctgtacggcttcatcccacgggttatcggtaccgtgaccgtaccagatatttgccgcgctgaagcggctcacgctccagcgcaacatgtcctgaatggtttgcagctcatttactgcttcatcaacgaaaattttatccacgtattcctccagggcatgatcgcaataatttcggcggctagtttgccatgaagatgacgataaatcagcattcacgcgcggtgagtgaggaaaaatacgtttaaaacgatcgattgcgctacgagtcgggtaaactgtaggaaaattagaaatagagacagataaatgaaaaagaaaacaacacttagcgaggaggaccaggctctgtttcgccagttgatggcggggactcgcaagattaagcaggacacgattgtccaccgaccgcagcgtaaaaaaatcagcgaagtgccggtgaaacgcttgatccaggagcaggctgatgccagccattatttctccgatgagtttcagccgttattaaataccgaaggtccggtgaaatatgttcgcccggatgtcagccattttgaggcgaagaaactgcgccgtggcgattatagcccggagttgtttttggatttacacggtctgacgcagctgcaggccaagcaggaactgggggcgttgattgccgcctgccgccgtgaacatgtgttttgcgcctgcgtgatgcatgggcacgggaagcatattttgaagcaacaaacaccgctgtggctggcacaacatccgcatgtgatggcctttcatcaggcaccaaaagagtatggcggtgatgcggcgttgttggtgttgattgaagtcgaagagtggctgccgccggagttgccctgaggagttgagcgcgttgcgccaggtacgggtaatggcaggggcgaatgcccctgcctggtgtatctaagggttacaactcattcagtatgtactggaaccggcaagtagaatcgattggctgcatactgctggtatcaacacgcacgaccatatcgtgtaactgtttgtccgttatagggtgtcgatttggcgtgacgctgacttccgccttgtcacatccgctcgcggtaaaagttatcatctgtgcaacccagcggcagtaaccacctgtttcattcatctgcgtactgtcgcacaacttcccatctttcatcaaatacgtactaagcgttttctcaaccacaccgcccgtgctctgcagggtgagcagtttactcttactgacataattctcattccaactaacgtcataaggttgaacagaaacggatggacaaatcgtgtcgtgactatcaggcccctgatacgtcacgccccctggagaggcttcagagtcattcataataaccaaccatggacaagaaaagtaagattcaatctctgcagagacaataacctcaaatgtataatacccgcagttccacccagacggtaatccaggacaacttgctttgttgatattttgatggtagccaatcagcttaacgctaggggcaggaggaggaccactccagctcacattttgcaatatttccccagtcatgagccattgactacttttatattcaccaacgtacactgcggatggcatcattatttttaaattaaaagtcgcaatattacggctatcaccgttgtaaccgtagtaaacgtcaacgctatgcccggcagccatagcttctgtagtagcaataagcatgaccagagcgaacaaccatcgtagtattttcattttaaatatactcaaatgtcgcagttaaagaggcggtaaattcaccgatcgtcacatcacggccgcttttcgcctgtagccaggctctgaaattgatatcgttattgccattggttagcgcaaaggtcgccccatttgtattgttgatggcaacctgcattccgtcggttttttccatgccaattcccactccctgagcggtactactcgtatccagtgccagaaaaccgggttgttcgctgtcttctacccccgtgagcgtgacttttacgttgtatcccgccggccctttgcaatctttcagcttaaagactacgggtacacgagcggactggcctgcaacgttcaaatcctgacgactgaccgtgggaaagcgcacctctgccagatattggccatccaccaccagcgcacaggatttacttaataaattaccggagaaatgcagattattatctgccgcgaataacgtgctactcattgccaatatcagccccgctaacaggacgtaaccaccggactgaatcatacttttattcattgataatccacccgtaatgttgcgtaagcgctaaaattcgtatcgcttaacacagcatcactcgcttttaccggtacggcctccagcttcggcttttgcgtaaaatcagtggcgttgatagcaagcggagtattgagtttaaaacgctgaccatcgtgctgaagctcgataccaaaaccgggtacatcagtttcaattgctgcatcattaaaactggtttgtgtaccagtccaggtgagggtcatctcccaatctggatgacgggtcgtgctgtcacaagtgagttcatatggcacctctttacgaccatagttgccgttgatgtcgtcgataatgagatcgcgaaattcgacttcaatggttttaccaccgctgatgctacaggttggcggactcaataatgtcccgtgaaaggtgatgtcttcatcagcagcatgagctatggcgctactgacacaaagcagggttaagaaagtctttctcattgatagtccaccaccatggtcaaactggcgttaaactcgcccgcagcaagttgcgccccgcttgccttcacaggtacagccttcaactgtggctggttattgatattaaatggcgtccagctattttcaccgacggcaaacaaactgttatcggcgctattttctatccgaatgcccagcccggtgatattggtactgagtaccgtttcgccgttaatcgtactggtattgcccttaagttgcatccgcaagtcgttagcaagactgtttgtgcagttcaacgtgtatttcgcatcttgccgataattggtgccatcaacgttatcagcaatcatattgccgaactctacctggctgcccttgatactacagggtggcggagcatcgaccaacacgcgcagaattaaatccacgggtttactaccagccatagcagataaactacagacactgcataccagcagccctgcgcccactacaaacttttgactcataactccccccgtcatcagcctttgcggctctgctcttcatccacctggcagctgttgccattgcactggaagaacagcggcatccgtgcgccaaagtcgttgacgtaagtcagcaccggtacgctatccattttcacattcagcggtaccgtggttttcggctcaatgaccagagggctgaaccctgcagctggattaccgtttttctgcgcactggcgttgctgataatcacgtagtacggcgttgggttattgacggtaaatgcctgaccgctgcgggtgagcgtcaccttgtgctgccacggacttttcatactgaccttttccagcgcctttggtcgccagaacaacttgatacgcgtttgcagcgcgatttgcagggtattgggtttgttactttttggcgggatctcgcgcacgttaaagtagaacatgctttcacgatcggctggcaatttgttgatatccggcattccctgcacttttacctgcccgttcatcatactatcgatgcgttgcactggcggcagcacagttaacgggctggtgatcttgttacccttttcatcttcaatccagctttgagccagataagggagtttcggatcgttattacgcagcgtcacgctgatacttttgtcgctttcattaaatatcaaacgggtacgatctggcgttacagacgccagggcagacaaactggtagcgctaagcagtaacgccagcgtcatagcacccaatttggcagagcaaagtaaatcagacatggatcattccttaatcacgttattggttagcactaacagaaacagggggatcggtgggtgtcacctgttgcgtctgctcctgaatgacaggctttatgtcatcaggaacaaccggcgcgacgttgcctttatgctggcatggcagtaacaagccgttaaacagatcggcaggcagcgggtccggcaggttgatatcgcaatgcgcaacaccactccagaacacactcatatgttcgccaggtttcaccccagccagatagacactaccgtcatcatcgacaaggcccactgtctgctcgttatcattttttacttctgcgccaaacggtggatggctgccatcttgtaaacgcagcaccgccatcgctttttgaccactgatgacggcaaatttgcggtagccaatggctccttcagttagcgtggcttgcaccacgctctgggttgcttcggcgttttccggcaatttgttgaggtcgatatacgcctgattgcgataataattgttaacgtcagaaacgacggctttaccaaacatattggtataaacagcagccccgttaccttccaccggaacatcggcaacgccatcggcatcaatcagcaggcgtgtcccgcccatattctgggtacggtgaagtgcgccgccgtgggtagtaagcgttgcgccgccctgtaagctcaagcccgcagaggtgtattgcccttcatggtagttcgcactgaggtcaacctgcgccaggctaccatcatggctgtagtagccatcaacgctggtgtgtttgtcactggtgccgatgttcaactgatagtgagtcgcgtcatcgacacggctaaaataaccgacctggctgctgtccgtcccactgccatagttgccgttatagctaacggtactgttgtcgccccacggcatactgagcgaaatttacatgcccttatccgcccggttgtcatactcgtagcggtagccagtcagggaaacgctcatattacgaatgctgcccatattgaaatagtgggagagcatgatgttgtagtttgtctgctcctcacgatcccagtaggtatggcgggtatagttgagataaacgctaacacccgcatcgcggaagttctggttataagtggcggtgtacatctctttgtcgttgcccgtacggaccatttcgctgtcactggcatccagatactcgctcatggtcataaagttctcttcgctgaagcgatatccagcgaaagtgacgcggctgttgagctggtcaaagtctttggaataactcacacggaaggagttaccgtccaggctacctttgccataagcggtgtctttatccagtttggtatggctatgagtaacatcaaacgcgaccgcgccgaaggtagacaaatcgcgaccgacgcccagcgccgcagactgatagttttcatcacccagcgcaccgccatataagctccagccgttagcgatgccccaggaggcttcagcaccagagaaaaatcccccctcgacatggtggccccactcttgcggacgtcccatcatgatcttatagcgaacctggcctgggcgagtgaggtatggcatgctggcggtgctgatgtcatattcctgcacctggccgttctgttcttcaatgcgaatatgcaacgtaccggagacggaatcaccaagatcctgaatacgaaacggtccagccggaacctgcgtttcgtaaatcacacgccccatctggctgacggtcacttttgctgtggtgtgtgccacgccggaaatgtctggcgcgtagccgcgcagattgggaggcaacatttgatcgtcagtgctgacactgccaccaacataattaaaaccgtcgaaaatatcggaattgaggtaatcttcgcccagcgccagtttggcttttaaactcggtaacgcccgccaggcataatagcgactccactcccattttttttgtgtgtcatcgccgccaaattcatcgtcatcatcattactgcgcgtatgttgatagttggtctgccagtcagcgcgcatacgccatggccccaggttaaccccgaccgtcccgttgccgctgatctcgttactgtcatcgccgccattttcttcgtgtcgtgtttgcgcagtgatgctgtagtccgcaatgatcccggagatgccatcatcccaacgagaaggtggatcccagtcgggccaggcatattcgaggtaagcctgcggtagactaatgactaatgcggactggcttaaatcagccttaatttccacgccttccagttgaccgggcttcaggcatttaccatcgtggctccattgcagatttttcgccacgtcttcttttaaaccaaactgcgccaccagttccggtgtcagacaagcatagcttttgctaacgtcatcttcaccagcataccagtaaatatcgtactcttccgccaatggctgtttatttagttgaacctgtaaattgtattttccgggctcaacatacccctggctggaaaaacgcttcagatcaatttttgtgtcgccttttaattccagaaaacgggaatcaaactgaatgtcgtcttcagcccagacactgctataactcccactcattgccagcgcaatgcaccacggaagaatccgtaatcgaaaaagagaatggtcaggcatacacgtttttatccgtttttattcttgttcggtcaaaatccatttaaataccccatagcagtgtcgctatgggggtatgccttacaggtaagtaatctggaaggtggtatttgcttcgaaattacccagatctggcgcatcagctgcgccgaccagccaggctttaaagttcagagtctgcttcgctttgcctttattagtggcagtatctttcacgattttctggtcaatacccatgccgcttttgtaagaggtacccagagagtcaccgatcgccaggctaacattgttaaatgccgcaccggtatcggtattgaaaatggtgtaataattgccgctatttgcagaagaaacggtaccagtaaaggtagtggtcattgtttcctgagtatcaaatacgcaatcttgcaggcgaatctggaaatttttcggcgtggtggtgccgttatttttcagtttttcggcaccgatatcacccatatcaacttccagtttgtgatcgtccggaacgatagaacacacactgtcttcaatggtgccgtaaaaacgtgcagtaccgttgttacccgcagcgattgttgccgtagaggtgaacgcgcccatcaccattgccgcagcaatagctgttttaacaaacttactcattatttgtccttaaactataaataattaaaatataaacattgcaatacattgattcagtcaatagccaatgtttatacccagccattgaatacggcatgcgatccaaaaaaacaggtcgtaaaaaatgtattcgttggtgtggggtcgaatagtgatgttttcactcccctgattcaatttaattttactaatgagtaaatgtagatttaattaatatattgataggggaaagattatcttaaggatcttctaaaaaaacacgaaatatatatttagaaaaaacaggaagcatatcaacaatgaatgccaatagcttaaaaaacaaacaatgaacatataatgcgattggcattaacccgcttttgtcgatataatatataaacactatagccagaatttaatcaagtttcaattacgtcctgcctgattattcaactctattttctccattatctgtattaataaatgataatgagtgtcaaacagacattattcatttcaacatgtaactttgggcaaaatcaagatacgcgcagaagaatactttccgaatgaaagttaaaggtgttttatttatagatggggagagtcttcgatagtagtgaggttgacagatatccgctgcctgatgagcaattatgcccaatgaatctacctcattgggcataatttggaactcatcagatagcttttgccatcttcagattacacgggctcatctgccagttgaatgtgccgtttccgctttcatcaagcgttacgctggcaatggcgctggtggtaaacataggcggcgtttcgcccggacataactcggcaaccagatacccgactaacggtaagtgagagatcaccagtacgctagcaacaccttcattggtcaacgcctgcaaataggcactgaccagaccaacatcgccgcagggcgttaactccggcagaacttctgcactggaaggcaggttcagacaatcccctacttcttccagtgtttgctcggctcgcaggaacgggctcaccagaacgcgttcgatttccactttttgacctttcagccagttcgccatcaggcgagattcgtcacaaccattagtggtcagaggacgaacggaatcactggcggcatcgagggctgcgtcgccgtgacgcatgataaaaacttgcatattgcaccgcttttgttaaccagattcgcccgttttctttcatctgaaaccagagaaagaaaacggtggccggcattgtgccttatccattcaccgaatgaaacgctgttttttacctcaatggcgtaagtatagtcaatatgcgtttacattttgaccaacactccgccattcagcgcggattcatatagctttgaccttcttattgcaggtcagttgcagttgttttccaaaaactttccccacgcgcgcccatctcgaccaaacgctcgcaaggggtaaaacgggaaccatactgcgtggcaagtcgttgcattattgcaaccacttcgcccgcgccgagagaatcgatatagcggaacggtccaccgagaaatggcggaaaaccaatgccaaataccgcgccaatatccccgtcacgcacgctacggataacctgctcatcaacacaacgtactgcttcattcagcatcaacatcacacaccgttcagcaacctgcggtgcggagattcgcccctgcccttgtgtgccaatcagcgggtaaatggcgggatcgacctgttttttgcttttacgccctttctgaccataaagatagaaaccccggccattttttctgcctttgcgatcgtcgttcaaaatactagaaacaacatttgcaggcgcgctaaaacgttctccataagcggcttccagtacaggaataattttagtcccggtgtcgattcctacctcatccaaaagttggattgggcctaccggaaaaccaaatttcactagcgcggcatcaatgtgctctacccgttcaccttgggtcaacatgcggatagcttcattaatgtaaggcgctaagatgcgattgacgtaaaaaccggctttgtcacgcacgacaattggcgttttaccctgttttttcgccagttttactgtggtagcgatggtttgcgcgcttgtccccgcatgaggaataatctccaccagcggcattttttccaccggactgaagaaatgcaggccgataacttgctcaggtcgcgtggcgtgagcggcgatatcaccaatcggtaaagaactcgtattgctagcaaagatggtatgagcggcgcaattttgctcaacttccgccaccatctgttgtttcaattcgagattttcaaacaccgcttcaataatcagatcgcgatgggcaaagccgcgatagtccgtcgttccggagattaatgccagctgtttgtcacgttcgctggctttgagatgacgacggcgaactttgccctccagctgatcccaactgtacttcagcgcatgatttatgccctgcgggttgatatctttaattctgaccggaatccccgctttacaagcagtgacataagcaataccgccgcccatcaagccaccacctaaaatccccacgctgtttaatggcgcaggcggcgcatcactgccgggatctttcttcacgtccgtactggcaaaaaagatactacgcagcgcctggctttgtggcgtcatcgccagttcgccaaacgcccgagcttcggcgtcataaccgctgctggtgccctgcgctaatcccgtttcaacaacctccaggatgcgttctgtcgccggataattgccttgagttttgtgttctgttttcttgccgaccattttgaacagcagcgcacgacctaacggccccgccagaatacgctcgcgtacaggtagagggcgggaagatgggcgctccttctttgccagctcaacagcggcttccagcagaatggagtgcggaacaacgtcatccaccagccccagctttaatgcctgtttcgcccgaagttgttttccggtgaggatcatctctaatgctgtgctgacgcctatcagacgcggtaaacgctgggtgccgccactaccgggtaacaatccaagttgtacttcaggcaaaccgagcaccgttttaggatcgtcagtacaaacgcgaccgtggcacgccagcgccaactccagcccaccacccaggcaagcgccatgaatagccgcgataacctgaatgggcaaagcatgaatctccgccatcaactgttggccctgccgcgccagagcttccgcttcttgcgccgttttgcagttgccgatcatgttgatgtctgcgccagcaatgaagttgtccggtttagcggagacaaacaccacgcctcgcaactctttgttttcacggagttgcttaataatggcgcgcacctggctggcaaactccgccttcagggtattcattttctcacccggtacgtcgatggtgataacggcaatgttgtccagacgaacattaagggtaaacgcacttgtcatttccattattccgcctccagaaccattgccgcgccaagcccaccggcagcacaggcggtaactaaaccaaatccaccgccgcgacggcgaagttcatgcaatgtctgggtaatcatccgcgcgccggtcgccgcgaagggatgcccgtaagcaatgctaccgccaagcacgttaaatttgctatcgtccacttcgccagtggcatgtgcacgccccagtgcttcacgagcaaaacgttcactacccagcaactgaatattcgccagcgtctgagctgcaaaggcttcgtgcatatcgatcaatgtcagatcgctcatcgtcaaaccggcacgctccagcgccagcggtgtactccaggctggaccgagcaacatgtcctgccagacatcaatcgcagtaaatgcgtagctgcgcagataccccagcggcaccagccctaattctttcgcccgggattcagtcatcaggatcaccgctgccgcgccatcggtcagcggcgtactgtttgccgccgttaccgttccgtgtttgcgatcaaacgccgggcgcagctttgcgtaatcggcaaggctggaattaccgcgaatattgttgtcttcgacaagcggttgtttataaggagggataaaggcagtcatcacctcttctttgagttttccgtcactccatgcctgagcggcacgctgatggctacggtgcgctaatgcatcttgctgttctcgggtgatgccgtaggttttcgccatttgctctgcggtgtcgcccatccgcaagccggtagaatattctgctaccgcaggtggtacgggcattaagtcgcgcaaacgcaggcgagagaagagtttcagtcgctggctcatggtacgagctttgttgacatcaaccagcacgcgcgccagttttttactgacgccaattggcaatacgctagaggaatctgccccaccggcaatccccgctcgaatagttcccgccatcaggctttctgcgacgtttgcaactgcctggaaactggtagcgcaagcgcggctgacgctgtaagcatcggtatgtacattcattcccgtaccgagaacaatttcacgcgcaatgttgggggcttcaggcatttgtacgacctgaccaaagaccagttgttcaatcacttcggcggggatctcgctgcgtgccagcagttcgcctaccaccatcttccctaaatcaaccgcgggaatgccatgaaaagccgtcgcctgacgggcaaaaggcgtacgtaaaccgctaacaatggcgatacgatcgccctggcgggtaaccagcggtaaaacctgacccataacactcccctgtaaaaaaataaataaagtggtctgacctgatcatagtcttaaccatttttttacatttagccaagtggagaaaagggaaagtgggagctatgacacagagagaaaagaagaagagaaaagaaaacgcccctgccagcaactgacaggggcgtacgtacccgagaggaattaacgcagacccagctggaaaatcagcatttcagcttcgcaggcaaaagtgaaatcgatatccaggcgcacaccgtcagactcttcagtgaaagtcggggtgattttgcaaggttcagattccacgctacgggctttttcagtcagcgccgccagcgtttgctctgcttctgcgcggtttgcaaacacgcggctgtaagacgcggtgcagtcggagttgtccataatggtgccaacatccatacagcagcaaaccggggtttcatcagcactacatttactcatcgttgatttcctctgtatgtgcacccaaggtgccagataaacgttgtggatattttacgcttccggaaagtgctgctccagttgttaattctgcaaaatcggataagtgaccgaaatcacacttaaaaatgatctaaaacaaaattcacccgaatccatgagtgcgccacctccaaattttgccagctggatcgcgtttcttagatcatatttgaaaaaagatagaaacatacttgcaacattccagctggtccgacctatactctcgccactggtctgatttctaagatgtacctcagaccctacacttcgcgctcctgttacagcacgtaacatagtttgtataaaaataaatcattgaggttatggtcatgagccagaaaaccctgtttacaaagtctgctctcgcagtcgcagtggcacttatctccacccaggcctggagcgcaggctttcagttaaacgaattttcttcctctggcctgggccgggcttatagtggggaaggcgcaattgccgatgatgcaggtaacgtcagccgtaaccccgcattgattactatgtttgaccgcccgacattttctgcgggtgcggtttatattgacccggatgtaaatatcagcggaacgtctccatctggtcgtagcctgaaagccgataacatcgcgcctacggcatgggttccgaacatgcactttgttgcaccgattaacgaccaatttggttggggcgcttctattacctctaactatggtctggctacagagtttaacgatacttatgcaggcggctctgtcgggggtacaaccgaccttgaaaccatgaacctgaacttaagcggtgcgtatcgcttaaataatgcatggagctttggtcttggtttcaacgccgtctacgctcgcgcgaaaattgaacgtttcgcaggcgatctggggcagttggttgctggccaaattatgcaatctcctgctggccaaactcagcaagggcaagcattggcagctaccgccaacggtattgacagtaataccaaaatcgctcatctgaacggtaaccagtggggctttggctggaacgccggaatcctgtatgaactggataaaaataaccgctatgcactgacctaccgttctgaagtgaaaattgacttcaaaggtaactacagcagcgatcttaatcgtgcgtttaataactacggtttgccaattcctaccgcgacaggtggcgcaacgcaaagcggttatctgacgctgaacctgcctgaaatgtgggaagtgagtggttataaccgtgttgatccacagtgggcgattcactatagcctggcttacaccagctggagtcagttccagcagctgaaagcgaccagtaccagtggcgacacgctgttccagaaacatgaaggctttaaagatgcttaccgcatcgcgttgggtaccacttattactacgatgataactggaccttccgtaccggtatcgcctttgatgacagcccagttcctgcacagaatcgttctatctccattccggaccaggaccgtttctggctgagtgcaggtacgacttacgcatttaataaagatgctagtgtcgacgttggtgtttcttatatgcacggtcagagcgtgaaaattaacgaaggcccataccagttcgagtctgaaggtaaagcctggctgttcggtactaactttaactacgcgttctgataacgcgttcgcctggataaagtcacctgcatagcaggtgactttaactcccccacttcaccgaaagtagtgtcctcattgcttacctcctgagttttgcaaacagcctgttggcagcttgccctttcaaatcaataagcggtatccacagacaaacctgaagggaaaggcatattttcaggcgttctgctcgtccttctcaaagagtttacttttctgcatttccaggatactcccccccccctggctattgtgcgctcatacactcaaattaaagataggttctaaataaatgagcgttttttgatagtctatttcattaggtaatatatatttgtaacaaatcaatcaaaatggaataaaatcatgctaccatctattagtatcaacaataccagcgcagcttacccagaatccatcaatgaaaataacaatgatgaagttaatggattagtacaagagttcaaaaacctttttaatggtaaggaaggaataagcacctgtattaaacatctacttgagcttataaaaaacgccatacgagtaaacgacgatccttatagatttaatattaataattccagtgttacttatattgatattgactccaatgatacagaccatattactattggtatcgacaaccaagaaccaatagaattacctgcgaactataaagacaaagaactcgtccgtactatcattaatgacaacatagttgagaagactcatgatatcaataacaaggaaatgatcttcagcgcattaaaagaaatatatgatggagatcctggttttatcttcgataagataagtcacaaactcagacatacggtaacggaatttgatgagagcgggaaaagcgaaccaacggacttatttacctggtacggtaaagataaaaaaggcgactctctcgctattgtaattaaaaataaaaacggaaatgattacttatctctcggttactacgatcaggacgactaccacattcaaagaggaattcgtattaatggtgatagtctcacccaatattgtagtgaaaacgccaggagtgctagtgcgtggtttgaaagcagtaaagctatcatggcagaaagttttgcaactggttccgatcatcaggttgtaaacgagctcaacggggaaagactgagagaaccaaacgacgtttttaaacgttatggtcgagcaataagatatgattttcaagtggacgatgcaaaatataaatgcgaccatctaaaagaaatagtttctactttagtcggtaacaaaattaacgttggccattctcaaaaaatatataagcattttaaggatctcgaaggtaaaattgaagaaaggcttcaaaatcgccaggctgaatatcaaaatgaaattaatcaaccatctgcgccaggtgttaattttgatgatatttaaaattatttttccagttttttgatttttcaacagctgaatatcggaaatagtcagtgacgaacatcagtatttttacataattacgtctaggtcattgtcggtttatctccttttacttgtggtaattgagggataacaacaaaaaaggtgagttttgcgactcaccttttttatttgtttcttattcagaatcaatatcttttaaatcatcctgaatcgcttgtgcgttcggattttcctgcggtttgagttcgccgccattagcgatgaaatcatgacgctggaagtacgcttcgcgcaccataatataaggatcggagctctgacgcagcagaccatcggaatccagcagctgagcgcgggtttcgatcccttcaagcgtccatttacccacagacatcggccaggtcagccaggaaagaaccgggtaaaaaccatccgccatatcaccaccgtcatcacgcagcgtgaagctaccgtagaacggtaactgaacgtaaggcccataacccacgccataatgaccaagcgtactaccgaagcggtgaggttcagtccgttgcagtttcgggttcgccatccctgcaacatcaataaaaccgcccatccccaaaatggtgttcaggaaaaagcgggtaaagtggaccatcccctgataagggtcgccctgcaagaagtagttaaccatcaccgcaggttcttcaaggttgccagtaaagttgctcaaaccgttacgcgccggttgcggaacataatcacgccaggcgacagcgaccggtcgaacaatatacgggtctaatacattgaagttgaagttgtacatggtgcggttgaacccttctaacgggtcagaacgcccttgctgatctgtaccggaactcgcacaccccaccagaagcgtagttcccagagcaagcgcgctcaggcgaagcttcataaatgtctccctgtttttttatggcttatgcagtttgccatccatgacggaacgataccgtatccgcctgtttaggtgtgggcgattgtaacagcacgtcaactgatgtccagacgccctgatttgctgatttgatcatagcctggtaatcgccgccctgtaggctacttgattctatagaaacagaaaaaggcaaacgcagccttttctacattttcagagtaactcccgtcagttgcgagcaaaaaagccgctacgctttagctatacgtgctaattcaagagaagagaccatggacaacgacaaaattgatcaacacagcgacgaaattgaagttgagagcgaagaaaaagagcgcggcaaaaaaatagaaatagatgaagaccgactcccctcccgggcgatggcaattcatgagcatatccgccaggatggtgaaaaagagctggaacgcgacgcaatggcgctactgtggagtgccattgcggcgggtctgagcatgggcgctagcttactggcaaaagggatatttcaagtcgaactggaaggtgtgccgggcagcttcttgctggagaatctcggttatacctttggttttattatcgtcattatggcccgccagcaattatttaccgaaaataccgtgactgcggtactacccgtcatgcaaaaaccgacaatgagcaacgtcggcttacttatacggttatggggcgtcgtgctgctgggtaatattctcgggacaggtattgcggcgtgggcatttgaatatatgcctatcttcaatgaagaaactcgcgatgcatttgtcaaaatcggcatggatgtgatgaagaacacccccagcgagatgtttgccaacgcgatcatttccggctggctgatcgccactatggtttggatgtttcctgcagcgggtgcggcaaagattgtggtgattatattgatgacctggcttattgccctgggtgacaccacccatatcgtggtcggttctgttgaaatcctctatctggtgtttaacggtacgctgcactggagcgatttcatctggcccttcgcactacctactttagcggggaacatctgcggcggcacctttatcttcgcgttaatgagtcatgcacagattcgtaacgacatgagcaataagcgtaaagcagaagcacgccaaaaagcagaacgtgcggaaaacattaagaaaaattataaaaacccggcataaatggcgagggtttaagcaatcgagcggcagcgtacttaccccgcactccattagcgggtatactcatgccgcattgtcctcttagttaaatggatataacgagcccctcctaagggctaattgcaggttcgattcctgcaggggacaccatttatcagttcgctcccatccgtaccagtccgcaaaatcccctgaatatcaagcattccgtagatttacagttcgtcatggttcgcttcagatcgttgacagccgcactccatgacgggtaaaaagtggataaaataattttacccaccggatttttaccctagagccatacagcctcacactcgatgaggcctgtcagtttcttaaaatatcctgatctaccatcgccgtcatagagcgtatttttattacctgatttgcaggttcgattccctattcggagatagcactcatgcaacacgaactacagcctgatagtctggttgatttgaaattcatcatggctgatactggctttggtaaaaccttcatctatgaccggattaagagtggcgacctgccaaaagccaaagttatccacgggcgagcaagatggttatatcgtgaccattgtgaattcaaaaataagctcttaagccgcgccaatgggtaaaatagcgggtaaaatatttctcacatctaaaaaacaccattccaatcaatcccctgctgcttcaagtagatgtctgcaggggacaccatccttgtgtttatccctaaaaccacataaaaaccgtaaattaaattcgaactagcaggccgaataaggcacaccaggaactcgtggttttattcattaactagtggtttttacctgttctcttagccagataataaacgcttcaatttttggccactgcctgcccggtaatgtggtgatgtaataatgctgatggcatttcaccgtcatatcgccaaacggcgcgacgagctcaccactggcaagccttttttgtaccaggcgttttcttcccatcgccaccccaatatgattcatcgcggcaataacagctaaatcagaacgatcaaagccaattccagaagatgtcggcaaattaaccgcataatgttgcgcccaactatgccattcatccgtaccggagtcgttgctccatgcctgtctgtcatggagcaacgtacagtgacacaggttaattaccgtgttggttaaagcatgtctttgagcgtattccgggctacatactggcaggatttcttcatccatcagaaagtgatgagtgagttgcgcactcggcgcatcatcaaagtagatcgccaaatcgattccggcacgttgcagattgacgttgtcattaccagtgagcacggtgaggctaatagacggataccggcgtgtaaagtcacctaatgcgggcaccaaccagcattgggcgatagagggccgggaatacagagttaacgttccgcttaactcctgatttttgatatcaagaatttcctggttcagggtatccaggctgctttttagcgcccaataaacacgtttcccctcgtgcgttaattccactttgcgatgggaacgaacaaacaactgaatgcccaattcttcttccagctgattgatacggtgacttaccgcactggggctcaggctcaattcctctgccgccagggcgaaggactgatgcctggcagccacttcaaaagtatgcattttacttaattgccagccgttaagcagccgatttcttatttcacgaaggggttccataatcacctcatttttcgcttaagtgtaaaaaaatagcggcaaaatttcagctatgagatgagctaaagtgaaccatatctcaattcaccttcatttttagatgtaaatcactccattgatgcaatttacctcatgtgaaaggcaaattttatcgtttgtcagcctgcgttgtttttttgtccaatatcatcaggttaatcacaggggaaggtgagatatgcactctcaaatctgggttgtgagcacgctgcttatcagcatcgtgttaattgtactgaccatcgtgaagttcaaattccacccgtttctggcgctgttgctggccagcttcttcgtgggaacgatgatgggcatggggccactggatatggtaaatgctattgaaagtggaattggcggaacgctggggttcctcgcagcggttatcggccttggcacgatactgggaaaaatgatggaagtatccggggccgcagaaagaattggtctgacacttcaacgctgccgctggcttagtgttgatgtcattatggtgctggttggcctgatttgtggcatcacgctgtttgttgaagtgggcgtcgtgctattgattcctctggcttttagtattgccaaaaaaaccaataccagtttattaaagcttgccattccgctatgtaccgcattgatggcagtgcactgcgtggttcctccacatccggctgctttatatgttgccaataagctgggcgcagatatcggtagcgtgatcgtctacggtttgctggttgggctgatggcaagtctgatcggtggcccacttttccttaaatttctgggtcaacgactgccctttaaacctgtacccacagagtttgcagatctcaaagttcgcgatgaaaaaacactaccgagtttaggcgcaacgttattcaccatactgctacccattgcgctgatgttggttaaaacgattgccgaattgaatatggcgcgtgagagtggtttgtatatcttggttgagtttattggcaaccctatcactgccatgtttatcgccgtgtttgtcgcctattatgtgttgggtatacgccagcatatgagcatggggacgatgctcacacatacggaaaatggcttcggttctattgctaatattttgctgattatcggggccggaggcgcattcaacgccattttaaaaagcagcagtctcgctgatacgctggcagttattctctccaatatgcatatgcacccgattcttctggcctggttagtggctcttattctgcatgcggcagtgggctccgctaccgtggcaatgatgggggcaacggcaattgttgcacccatgctgccgctgtatcccgacatcagcccggaaattattgcgattgctatcggtagtggtgcaattggctgcactatcgttacggacagccttttctggctagtgaagcaatattgcggcgctacgctcaatgaaacatttaaatactatacgacagcgacatttatcgctagtgtcgtcgctctggcgggcacattcctgctgagttttatcatctaagcgcaaagagacgtactatggaaaacgctaaaatgaacagcctcatcgcccagtatccgttggtaaaggatctggttgctcttaaagaaaccacctggtttaatcctggcacgaccagtttggctgaaggtttaccttatgttggcctgaccgaacaggatgttcaggacgcccatgcgcgcttatcccgttttgcaccctatctggcaaaagcatttcctgaaactgctgccactggggggattattgaaagtgaactggttgccattccagctatgcaaaaacggctggaaaaagaatatcagcaaccgatcagcgggcaactgttactgaaaaaagatagccatttgcccatttccggctccataaaagcacgcggcgggatttatgaagtcctggcacacgcagaaaaactggctctggaagcggggttgctgacgcttgatgatgactacagcaaactgctttctccggagtttaaacagttctttagccaatacagcattgctgtgggcagtaccggaaatctggggttaagtatcggcattatgagcgcccgcattggctttaaggtgacagttcatatgtctgctgatgcccgggcatggaaaaaagcgaaactgcgcagccatggcgttacggtcgtggaatatgagcaagattatggtgttgccgtcgaggaaggacgtaaagcagcgcagtctgacccgaactgtttctttattgatgacgaaaattcccgcacgttgttccttgggtattccgtcgctggccagcgtcttaaagcgcaatttgcccagcaaggccgtatcgtcgatgctgataaccctctgtttgtctatctgccgtgtggtgttggcggtggtcctggtggcgtcgcattcgggcttaaactggcgtttggcgatcatgttcactgcttttttgccgaaccaacgcactccccttgtatgttgttaggcgtccatacaggattacacgatcagatttctgttcaggatattggtatcgacaaccttaccgcagcggatggccttgcagttggtcgcgcaagtggctttgtcgggcgggcaatggagcgtctgctggatggcttctatacccttagcgatcaaaccatgtatgacatgcttggctggctggcgcaggaagaaggtattcgtcttgaacctagcgcactggcgggtatggccggacctcagcgcgtgtgtgcaagtgtaagttaccaacagatgcacggtttcagcgcagaacaactgcgtaataccactcatctggtgtgggcgacgggaggtggaatggtgccggaagaagagatgaatcaatatctggcaaaaggccgttaataacgtttcaacgcagcatcgcaatcctttccctgggtgagcgatgctgccgatggcgcagacttaagatccccggtcttacccgctataaccccctccttttatcatcacccaacgcctttcgctgtaaacggcggtttcgcaaaccaaaccaaaaccgtaagtaagataaaagcaatagccgccatacggaaaatctcatttgcagaaatagaaagactctgctgggttatttcattattaatttcattaagaactccactaaggctaccataatatttatccataatttgactgctactattaaacacggggttaaattgatcgatggttgctgtcaactgactatggtgtaagctttcgcgtcgtccccacagcgtcattgtcaagctcgtaccaacacttccactcaaggtacgaaaaaaattactcatactgctggcattggcaaatttattatctggcaagccactaaagctaatcgttgttaagggtaaaaagaaacaggcaacggcgaatccctgaaaaaactgcggcaaaatgatgcctgtaaaatcaatcgttggcataaatgtcacagaacgccagtaatagcaaaccgcatacatcaaaaaactaaatgtcactaacaaccgcatgtctattttgttgccataacgtcctatcaaaggactaattaatagtggcatgatgccgatgggcgcataagcaagtccggcccatatcgcattataccccatcgtttcctggagtaactgcggcataaggacgatcgctccagagtaaaataaatacgcgcatgtgatactcacaataccaatggtgaagttacgggacttaaacaaactgagatcaagaatcgggttctcactggtgctctcccaaatgactaaagagatcagagaaataacacttactactgttaatattattattgtactgctgttgaaccaatccagatcgcgccctttatcaagcataatttgcaagccaccaacaccgagcactaacagggtcagtcctggtagattcattttgaccggactagtctcagtttctcttcctttaagtaaggttaagcataatgtcaggacgataatccccatagggacattgattaaaaatatccaaccccagctaaagttatcacaaatataaccgcccaatatcggcccacatatcggagcgataatcacggtcatactccataatgccagagcaaatgttcttttttctggcggataattccttaataataaactctgactcagtggaattaacggccccgccattaacccctgaacgactctaaaaaatatcagcacatcaagattggtgcttaggctacacattaaactagacaggctaaaaaaagtgacactaagtaaaaataatcttaattcgcctattctttgtgccaacctgccagtaacagggatcgcaatggcatttgctacaccaaagctggtgataacccaggtgccttcgtctgtacttgctcccagaaagccagatattgtcggtattgcgacgttagaaatagtggaatccaacatttgcataaatgtcgctaaactcaatgcaatagtgacgcaccataacgtcccaccggttaatggtgccggagtacttttagtgattgccattaaagttgtccattatggctaataatgttgctaatttctttttctatcggactggtatcgataactaaagccttactggtataagccggcatggaggtcacggtactagccagctcaggcatctcggcaatgtcttcgttcttcgtatcaatagttgctgtcatgcttaaaccaatacgcaaggggtgttccatgagttcttttggatcaagagaaacttcaaccggtacacgctgaacgattttgatccagttccctgtcgcattttgtgcaggtaataaggagaacgcattgccggttcccatattgatccctgtcacccgaccatgaaacacaacattttcaccataaagatcgctgataatattgacgctttgaccaatccgtacatccgtgagttgtgtttctttaaagttggcattaacccacatttgacgtgccggtacgacagccattaagctttgtccggggctcactgtttcgccgacctgaacacttctctgggcaatatagccggtaaccggactcttaatatccgtacgtttaagcgccaaccaggcttctttagttgcatccgccgcttcaacgacttgtggctgacggtttaatggtgtgttcattactaaagctttattcgctttataagcctggatagcggcattcaatgccgctttgctacttattaacgtatctttggtatgctccagcgtttctttactaataaccccctgcttcgctaacggcactcgacggttataatcttctaaagattgttgatactgaatacgtgcactagcgacttcggcactgtattgtttatcctgtaagtatagtttattcgtttgccgaacaatatttgccagattatttttagctttattgagtgcgatagtggcatcagttttatccagactaactaaaatgtcaccttgtcgaacgtagttcgtatctttatgattaacgacagtgacactaccactgacttgtgcagaaattggatctgcattccccgtgacataggcgtcatctgtactaatcatgtcttctaattccatactccaataggcataggcaccactaaacgcaataaataaaactaccgccaataaagaaaagtattttcttctgttagaatgttttttattactattaatctgttccactattatctctcatttctcatagatgaaatttatgaattgaatgaaaagagcattcattcttcatatcaaacacagtgcatgtgttgcacattatcccaggaacgttggaggcctaatttaaatgaggtgcaaaaaaaacaacagaggactaaaccgtggcttttgcaatacaattcttacgcctgtaggattagtaagaagacttatagtgccaacttgaaactataaatcatcggtacaatccctgattttattgttgacatttcatttatgccgactatttatatggtatacttgtcgaattatcttaaaggaagctcagattttcttatttttattgagaaaatgagatgacgccttatgtctgtattactacagggagaagggagatgcttcattgcaaagggaataatctatgaacgcaataattattgatgaccatcctcttgctatcgcagcaattcgtaatttattgatcaaaaacgatattgaaatcttagcagagttgactgaaggcggaagtgccgttcagcgggtggaaacacttaagcctgatatcgtcatcattgatgtcgatatccccggagttaacggtatccaggtgttagaaacgctgaggaagcgccaatatagcggaattattattatcgtctccgctaaaaatgaccatttttacgggaaacattgtgctgatgctggcgctaatggtttcgtgagtaaaaaagaaggcatgaacaatatcattgcggctattgaagctgcaaaaaatggctactgctatttccccttctctctcaaccggtttgttggaagtttaacgtccgaccagcaaaaactcgactccttaagcaaacaagaaattagtgtcatgcggtatattcttgatggcaaggataataatgacattgctgaaaaaatgttcatcagcaacaaaactgtcagcacttataaaagtcgcctgatggaaaaattagaatgtaaaagtctgatggatctttacacattcgcacaacgtaacaaaatcggctaaccacatgaagtttttaccctatatttttcttctctgttgtggtctttggagcaccataagtttcgcagacgaagattacatcgaatatcgtggcatcagtagtaacaaccgtgtcacacttgatccactacgtctgagcaacaaggaattacgttggttagcgagcaaaaaaaatcttgtgattgcagtacataagtcccaaacggctacgttgttgcataccgatagccagcaacgggttcgtggtattaatgctgattatttaaatcttttaaaaagagcgttaaatatcaaattaacactccgggaatacgcagatcatcaaaaagcaatggacgcgcttgcagaaggtgaagtcgatatagtgttaagtcatttagttactagcccgcctcttaataatgacattgctgcaaccaaaccattgataattacctttccggcgctggtaaccacccttcacgacagtatgcgaccgcttaccagtccaaaaccagtaaatattgctcgggtagcaaattaccccccagacgaggtaattcatcaaagttttccaaaagcaacaattatctcttttacaaatttatatcaggcattagcatccgtcagtgctgggcacaatgattactttattggtagtaacatcattaccagcagtatgatttcccgctatttcactcactccttaaatgtagtgaaatattataacagcccgcgtcaatataattttttcttgaccagaaaagaatctgtcattcttaatgaagtactcaatagatttgttgatgctttaacaaatgaagttcgctatgaagtaagtcaaaattggcttgatacaggaaacctggcctttctgaacaaaccattagaactcactgaacatgaaaaacagtggattaagcagcatcccaatttaaaggtgctggaaaatccttacagccccccctattctatgacggatgaaaatggcagcgttcggggcgttatgggggacattcttaatattattaccttgcaaacaggtttaaatttttctccgatcaccgttagtcacaatatccatgctggaacacagcttagccccggaggatgggatataatacctggcgctatttatagtgaagatcgagaaaataatgttttatttgctgaagccttcataacaacgccttacgtttttgtcatgcaaaaagcgcctgacagtgaacaaacattaaaaaaaggaatgaaagttgccattccatattattatgagctgcatagccaattaaaagagatgtatccggaggttgaatggatacaggtcgataatgccagcgctgcatttcacaaggttaaggaaggtgaacttgatgctctggtcgcgacacagctaaatagccgttacatgatcgatcattactatcctaatgaactttatcattttcttattcctggcgttccgaatgcaagccttagcttcgcttttcctcgcggagaaccggaacttaaggatattattaataaagcactgaatgcaattcccccaagcgaagttctgcgcctgacggaaaaatggattaaaatgcccaatgtgaccattgacacatgggacctatatagcgagcaattttatattgttacgacattatccgttttattagttggcagtagccttttatggggattctacctgttacgcagtgttcgtcgtcgtaaagtcattcagggtgatttagaaaaccaaataagtttccgaaaagcactcagcgattccttaccgaatccaacttatgttgtaaactggcaaggtaatgtcattagtcataatagtgcttttgaacattatttcactgcggattactacaaaaatgcaatgttaccattagaaaacagtgacagtccctttaaagatgttttttctaatgcgcatgaagtcacagcagaaacgaaagaaaatcgaacaatatacacacaggtatttgaaattgataatggcatcgagaaaagatgcattaatcactggcatacattatgcaatcttcctgcaagtgacaatgcagtatatatttgtggttggcaagatattactgaaacgcgtgatctaattaatgcactcgaggtagaaaaaaataaagcgataaaggctaccgtagcaaaaagtcagtttctggcaacgatgagtcacgaaataagaacaccaataagctctattatgggcttcctggaacttctgagcggttctggtcttagcaaggagcaacgggtggaggcgattagtcttgcctacgccaccggacaaagtctcctcggcttaattggtgaaatccttgatgtcgacaaaattgaaagcggtaactatcaacttcaaccacaatgggtcgatatccctactttagtccagaacacttgtcactctttcggtgcgattgctgcaagcaaaagcatcgcattaagttgcagcagtacgtttcctgaacattacctggttaagatcgaccctcaggcgtttaagcaggtcttaagtaatttactgagtaatgctctcaaatttaccaccgagggggcagtaaaaattacgacctccctgggtcacattgatgacaaccacgctgttatcaaaatgacgattatggattctggaagtggattaagccaggaagaacaacaacaactgtttaaacgctacagccaaacaagtgcaggtcgtcagcaaacaggttctggtttaggcttaatgatctgcaaagaattaattaaaaatatgcagggcgatttgagtttagaaagtcatccaggcataggaacaacatttacgatcacaatcccggtagaaattagccagcaagtggcgactgtcgaggcaaaagcagaacaacccatcacactacctgaaaagttgagcatattaatcgcggatgatcatccgaccaacaggctattactcaaacgccagctaaatctattaggatatgatgttgatgaagccactgatggtgtgcaagcgctacacaaagtcagtatgcaacattatgatctgcttattactgacgttaatatgccgaatatggatggttttgagttgactcgcaaactccgtgagcaaaattcttccttacccatctgggggcttacagccaacgcacaggctaacgaacgtgaaaaagggttaagttgcggcatgaacttatgtttgttcaaaccgttgaccctggatgtactgaaaacacatttaagtcagttacaccaagttgcgcatattgcacctcagtatcgccaccttgatatcgaagccctgaaaaataatacggcgaacgatctacaactgatgcaggagattctcatgactttccagcatgaaacgcataaagatctacccgctgcgtttcaagcactagaagctggcgataacagaactttccatcagtgtattcatcgcatccacggtgcggctaacatcctgaatttgcaaaagttgattaatattagccatcagttagaaataacacctgttagtgatgacagtaagcctgaaattcttcagttgctgaactctgtaaaagaacacattgcagagctggaccaggagattgctgttttctgtcagaaaaatgactaaatagcggctcccacaatgttcaaatgtgggagctatttaccagcacatcttacatttaactactgaactcctggcgaatttgttccccatgctggtcgagcgttgccgctcccggcataacatgcgggtccgcgcagccgctgatttttatcggattacccggcatcattattcccccggcttcaatcaacatatttctcgcctgagtttgtggcaatttaatggcctcagccacacttaataacggcgcgacgggtacaccaacttcatgtattctggctaaccaaacttcagctgcctgcgtttttaacgtccgctcaatatattgtttaagaatagcctggttttgtacgcgtaaaatattgctgctaaatcggggatcattaaccagttccgtaagctccagtgcctggcataacgcagaaaaaagcttgtcattaccacaacaaatcgtaatcggcttatcctgagtattgaaaacatcaaaaggtgccatgtagggatggcgatttcccagacgttgtggactcttcccagttgcgatatatgccatcagaccatgctccagaaaactcagcgtggcatcaaacatcgctatatcgacatgcgcccctctctggctcttttcgcggccataaagtgcactcactattccgctgaataaatagacaccgccgcatagatccgcaagagatgtaccaacgcgcactggcggagcatcaggatatcctgtttccatcattatcccgctcattgcctgaatgatggtatcgtaggcaggagcatcttttagcggaccggtatgtccgaaaccactgctactagcatatatgaggcgcgggttgatttcttgaagcgtttcccaactaaaccccagtttttccattgtacctgggcgaaaattctcagctaatacatcagcttgtttgagcatatttataaatatacttttatcgtgatcattctttaaatcaagaaccacactctctttgccatgattaataaaactgtaatagagactctgtccatccacatagggaccaaatgtgcgggtatcatcaccatgacccggcggctcaactttaattacccttgcgcccatattacaaagaagttgagttccgaaaggtccattaaggacatgtgtcatatcgataactaataagccttcaaacggccctttgctttcattatttgtcatttgcttatgccttgaaaaaagccgaaggtgaaaagacacttcggcatttatgtaaaatcaataacatgattaattaactaaccagtcgactgacataaatccacaagggagccgtgacgacaaagcccagtacgctcacagccaaactcgctgtaccagtacgggtgtagacattaaaccggctggcaataatgattccggagaatgccggcggtaatgcgcctgccagtaccatcatctgcagatgttcgctgttcaaatgacatgccataccaacgagaagcagtgccagtggcatcagaatcagcttcaggaaggtgttataagcaatttcggcactgaactcgaatttatgtgcagccagagtcaaccccgcagcgaataccgctaccccactgttagccttcgcaatcagattaaaggttgggtcccatgctgccggaatttttaccccaaccaacaccaggatcgttgccagaacaggtgcccatactactggctcctttgccgcagaaattaatgcgctcagattactattcttcttaccatccgctccactagaaggattcagcaaatacagaccaataggaatagtaattgcgttaacaataatagaaataattgctaccactaaacctgtacttacggaatcaccataaataggatcgagaactgcaaaccccaggaatccaatggtaggactacctgcaattaatgcacatacagctgcttctgcatgggtacgtttaaaaaatttgtagcaaccgaaccaggagaaaaagaaacatccgacaataaccacaagacttacaagggtcagacgagtgtccgcaaaaatcatttccctgtttgcccgagtaatagatacaaatagagccgcaggaagcgcgtagtttaataccagtttattaaatgcccgagcttgatcttcactaaatgtttctcgtctgccgctaaaataacccaacagcatgattacgataataggcaataaatcgccaataaaaaatgttagcataatagtatttccgataagggtcccctcaccatcgcataatgagttggcaagaggagacgatgtcagtatttaattaccagcgacttgttttgggttaagtttggtaatatggccactttcagttcctgctgcagggtcgatgaccacattaataatggtcggtttgcggctctgaataccggtggttaaagcatgacgaagttcatctgtcgtggtgacgttatagccaacgccacgaaacgcatccattaatttgtcataccttgcatggtgcaacagatccgttggacttggtgcaccagcgccactgagatcaacaccgtctcctctgtagatgccgccattattaaaaataacgatcgtcaccggcaggttatatcgacaaatcgtttcaatttccatcccactgaaaccaaaagcactatcaccttcaatggcgacaaccggagaaccagaagtcacgctagcaccgatggcatagcccataccgatgcccatgacaccccaggtaccacaatccagacgacgacgtggtttatacatatcaataatatttcgtgcattatccagggtatttgcaccttcattaactaaataaatatcctggttctcgcgcaatacgtcgcgcacagcacttaatgcattaaagtaatttaatggttgagtatctgtacttaatttttcatgcattttttgtgcattttgctgcttgtggatatttaaaatatcgcgccataccagtggagtcgtaaatgtgttttgtttcagttctgccagcataccttgcatactggatgcaatatcaccaacgactggcacagcaatggggcggttgctgtcaatttcctgcggttcaatatccagttgaataaactgtgtatctgccgcccatccttttttaccgtgtgccaataaccaattcagtcgtgcaccaacaagcatgacaacgtcagcatttgccagggcaaagctacgcgcagctgccgcagaaagtggatgcgtatcttcaaggatccctttcgccatagacattggcaggaatggaatctgagcactttcaataaattcacgaagctgttcatcagcttgactatacgccgcgcctttgccaaggataattaatggccgttcagcttttgctaaaaggctaattgcgctagtgacactcttcgggcatggcaataatgctgggctcggattttcaactttaacaatcgtggttaacgcttcgtctttttccatcgtcgcggccaggacatttgctggcaaatcaagataaactccgccagggcgaccgcttacagagacccggatagcgcgtgccaatgcaatgccaagatcctgcggctgattaacgcgaaatgctgctttggcatacggttttgccgcattcatttggtccagctcttcataatcaccttgctgtaggtcgacgatcgcgcggtcgctggagccgctaatcatgatcatcggaaaaccatttaccgttgcgttggccaatgcggtcaaaccattgaggaatcctggcgcagaaactgtcaggcagatccccggtttttgggtaagaaaaccgcttgccgcagcggcatagcctgcgctctgctcatgacgaaaaccaatataacgaatgccttccgcctgggcatggcgtgccatatccgtcacaggaatacctacaacaccataaatagtgtcaatattattctgttttaatgcttcaacgatgatatgcataccatctgtcatttgaagttgatcactcatgattaataacctcgaaatttttataaattgggagccagaagcccccgttaatatcagatggcgtggttttgcttcattgcagcaatttcatcgtcgctataacccagctcctgcaatacagcagcggtatgttcacctaatagcggcgcagctttaatatccggcgtaaaggcagagaatttcattggacaaccaacggtcagatattttccacgcaacggttgttccacttcaacaacactgccactttggcgcaaagagggatcaagactaatttctttcatacttaaaaccggtgcacaaggaatatcaaactgagtcaaataggccaccgcttcatgtttatcaatagtgacagtgtatttttcgatttcagcaaaaatatcgaaaatatgtggctgtcgtgcatgggctgtactgtatgccggatcggtaatccattctggtttgccgatggctttacaggtgttttcccagttttgctcctgaatagtgaaataaatataggcgttaggatcggtttcccagcctttacatttcaggatccagccaggctgaccgccaccacctgcattaccaccgcggggaactgcatcaccaaatgtaccattcggatactgcgggtattcttccagatgacccaatttatcgagacgctgctggtcacgtaatttcacgcggcaaaggttcaatacggcatcctgcatactcatggtgactcgttgcccacgccccgttttttcgcgatgcagcaaagcagcaagtaaaccgatcagcaaatgcattccggtgttgctgtcacccaacgctgcagcgcttaccagcggcggaccatcccaaaaacccgtagtggatgccgcgccacccgctgcctgagcaacgttttcataggcttttacattcacataagggctacactcatcaaaccctttgatgctaccaaaaatcagacgtggattgatttcttgaatatgctcccaggtgaagcccatgtgatcaatggcccctggatgaaagttctcgactaagatatcagcttcgcggatcagcttttccattacctctttgccttccgctgttttggtatttaactcaatagaacgtttgttactgttaagcatggtgaagtaaagcgcatcgatatcaggaatatctcgcagctggtgacgcgttacgtcaccaacgccgggacgttcaattttaataacgtcagcgccaaaccaggccagcatttgagtacaagatgggccagattgcacaccggtgaaatcgagaactttaattccttgaagtggagtactcatagcaatacctattagttaattaaatatgtgttaatttagcgtttatttaaggcgtaatatcttctataaataacccgcaaaatatcgtcgtagctgcactcgatatttttaaaatcctgtatcaagtgctgaaaatcatttcatcgccacttccaattcctttctgcatggtaagtagtgaggacgaaaagaagaatatgataaatattgattcgtggtaatcagagagagtcgcgacatttgtgatgttattcttacaactgtaagaagcgccggtgatttacaagcaagggtatgattacgctttttaaagcgtaccataaaacataacataataaatgatttgtgatgacacgggattattgcggtttactttgaggaatataaaatgcgagtttatagcaccgcgagcgccaaataattttatgaccacaacctgtcgtattgtggtcataaaaaattgtcggctggagggagttaaatcctttacctcaatatactgcctgtcagcattagttcacaaacagtgcttcgctatcgacgatgattccatcttccgcacctttaagcgccaggtttgcctcgtagtattgctttttatcaagcagtttctgcgcatcagcaagtgcattacgagtctgtttaagtggcatcagatattggttttccattacgccaacaccggccaggcgaagctcttccattgcgccctttttatcccctttcgccattttttcattggcaatttttatcgcggcttctttttcgggagttgctacataactctcagaaattccgacagatgcattaatgacaatatattggtcatcattgagattggtctttttacctggcttagcgaactttgcccattcggtactgtcatcactcagcaaagcggaagcttcattggtcagttcttttgccttttctggatcgccatgaaacagagccaggcgcgctacctgcacgtcacgcatcgcatataaaccttgttcagagatacgctctgctgccgctgccgttttctgggtttgctgaacttgctgagtttgctgttgtgccgctaccggagcattatcagcagcccatacagtactagatgccagaattgctgtgaccatcgtggccataattaaacgtttcatacttacctcattctttaacagttttagaaaacgccgccatcatattgggtgagcatgaaatgagaaatcagagagcaacggtcattttgaaagggttatcttacagttgtagttattatcgcaagaagtattttagtcttacaattgtaggaatatgcttcctgtcgcagagaactattcttatataccacaaagagatgtcatttattatatcgatgtaaatactgattaattaaatgtaaatacagccataacatcgtaggttctcagtgaaccattttcaggataactttctatgaaagtaaacttaatacttttcagcttatttttattggtctctattatggcatgcaatgtttttgcattttccattagcggtggtggaagtgagaggagctataaagagactgaaaaaacaagtgcgatgacgaccacacactctacaaaacttcagccaagtcaggcgattttgtttaagatgagagaagatgcgccaccattaaacctcacagaagaaatgccgcccccttttccgacaaaggcgaattatcttattcatcctgtgcgataacgtctttcacatggcaggtgaacaatcatgtctgatgctgatgtgaacacctgcccaaatgagccatcctgacccattaccgcctgccataccccaccataaagcgaatcatcaagccacaagccggggcaagaaacataaatatccccgtcactagttcattaccgccagttaaccacatggtgaagtaataaatgagtgcagcgaggatcaccatgccgaagaaagaagagaccgcgcttaccacgttcagtacctgaccgatgtagccgcttacgcagacaatacacagggcgagaaacatccataaattaatcatagctcaacctcctgccgcgctaaaaaacctgtaacttcagtcactttaatagtaagacaatccttaacctctggcaatttttgctaagcatcaatgaaaacagcatgttaaatgcaagactgttgtgtacggaaaaatatttactttgcacgattaataatcagtagctgaaagcagtcagcgagtgataaagtacagataccgcattcatgctcctcgtggttatgtcctgactagtctttacactctttacaggaaccattgtcgtacatgatggcccaaccaattgagtgtaccgctgtcgacatggaatcttctgcgatacaacaattcgtatctacagaaggtaactatgtttccacaatgcaaattttcccgcgagtttctacatcctcgctactggctcacatggtttgggcttggtgtactctggctttgggtacagcttccttatcctgttctctgctttctcggcacgcgtattggcgcaatggcgcgaccattcctgaaacgtcgtgaatctatcgcccgtaaaaacctggaactttgtttcccgcagcattctgcggaagaacgcgagaagatgattgccgaaaactttcgtagtctcggcatggcgctggtagaaaccggcatggcatggttctggcccgacagtcgcgtacgtaaatggtttgatgttgaagggttggataaccttaaacgcgcacaaatgcaaaatcgcggcgtaatggttgtcggcgtccattttatgagcctggaactgggcggccgcgtgatgggactgtgccaaccaatgatggctacctatcgtccacataataatcagctgatggaatgggtgcagacccgtgggcgcatgcgctctaacaaagcgatgatcggcagaaataatctgcgcggcattgtcggtgcactgaagaaaggtgaagcggtatggtttgctcccgatcaggattatggtcgtaaaggcagctccttcgcgccgttctttgcggtggaaaatgtcgccacaaccaatggcacctatgttctctcccgtctctctggcgcagccatgttgaccgtaacgatggtaagaaaagcggattacagcggatatcgtttgttcatcaccccagagatggaaggctacccgacagatgaaaatcaagccgctgcctatatgaacaagattatcgagaaagagatcatgcgcgcaccggagcagtacctctggatccaccgtcgctttaaaacgcgcccggtgggagaaagcagcttgtacatttaacaaactgctcttactctttccctcctcaaatcggccataataacctcatggtttttatggcttttttcttaaggttttttccttcgctgaatatctaattattaccgtcagaaattaaactgtcgccgatatgagacacttgtaagttactaaaagtaaataagaaaatgcctcttgtctcgtttcagttttaggcgtacattagcgccgtctcgagcagtttagctcagaattctggggtgatgcccacggtaaaatacagggcttttaaggtcgctttgcccggtgtcaactcactgtatcaggtgtaatgaagtcattcaggcgtaacagtaattacgcggagagatgtaaagtgaaatatttctttatgggcatttcttttatggtcatcgtttgggccggtacttttgccctgatgatctaaaagcaaactgtgcaatgaaaaacaggagccatcaggctcctgtttgcatttctgacgacggtgtttattccgcgttttcgtgaatatgtttgctgctggcgggtagtaaaccgtcggcacggaacatcgctttaatccctctgatggcctgacgaatacggtcgcggttttcaatcagtgcaaagcgaacatgcgtatcaccatagtcgccaaagccaatccccgggctgacacaaaccttcgcttcgttaaggagcttcttggcaaattccaggcttcccatggccgcatatggttccgggattttcgcccagacatacatgctagccttcggcatttcaaccatccagcccgcttcatgcagccctttaaccaatacatcacggcggcgtttgtactgttcggcaatgtcgcgcacgcactgttgatcgccctccagcgccgcaatcgccgccacctgcaacggcgtaaaggtgccgtaatcgtgatagcttttaatacgagccagggcgctgaccagcgttttgttgccaaccataaagccgatacgccagcccgccatgttgtagcttttgctcagcgtaaagaactcgactgccacatcgcgtgcacccggtacctgcataatactcggcgctttccagccatcgtagacgatatcggcataggccaggtcatggaccaccagcacatcgtagcgtttcgccagcgccactactttttcgaagaactccagttccacgcattgcgcggttgggttactcgggaagccgaggatcatcatcttcggtttcggataactttcacgaatggctcgctccagttcgttgaagaaatcgacaccttccaccagcggcacactgcgtacctgcgccccggcaatcaccgcgccataaatatggatcgggtaacttggattcggcaccagcaccgtgtcaccatgatccagcgtcgccagcatcagatgcgccaggccctctttgctaccaatagtgacgatggcttcactttccgggtcgatttcaacgtcgtagcgatcctgataccagcgggaaatggcgcgacgtaaccgcggaatgccgcgactagtggagtaaccatgcgtgtccgggcgctgggccacagtacataatttttcgacgatatgcggcggagtcgcaccgtccgggttacccatgctgaaatcgataatatcttcgccgcgccgacgcgcagccattttcagttcagcggtgatgttaaaaacgtagggcgggagacgatcaatgcgcgtaaagcgacgttcagggcgagtgtcagccataatttcctcagattaacgttagcgcccggaccgtccgagcgacgctgccacgatggtggctgttttgaaaatagcctgattaatttctgtctgtccagtgttttagaacattttatcaatgacgttaaatgaggaactctgctttaaaaacaggaaatttatctgcgctaacaagaaaattaccactcattctattaacataataatttcaataaatttactaaccagaagtgcattatcaagagatgcattgctaatacaccatttatctatcaatccccttttaaaattgtggtttttcctcaaaaacggcctgctggtcatcagccttcaggttacctatcatagaggtttaatccttattcagagtcacccgtgcacgaaatattcaacatgctgctggcggtcttcgatcgggcagcgttaatgcttatctgcctgttctttctcatccgtatccgcctgtttcgcgaactgttgcacaagagcgcgcactccccaaaagaattgctcgccgttaccgccattttcagcctgttcgccctgttcagcacctggtccggcgttcccgtagaaggcagcctggtgaacgtacgtattatcgcggtgatgtccggcgggattctgtttggcccgtgggtaggcatcattaccggcgtgattgcgggtattcaccggtatttaattgatatcggcggcgtgacggcgatcccctgctttatcaccagcattctggcgggttgtataagcggctggatcaacctgaaaatccccaaagcacagcgctggcgcgtcggtattctcggcggcatgttgtgtgagacgttgaccatgattctggtaattgtctgggcaccaactaccgcgttggggatcgatatcgtctctaaaatcggcattccaatgatcctcggtagcgtctgtatcggctttattgtgcttctggtgcaaagcgttgagggcgaaaaagaggccagcgccgcgcggcaggccaagctggcgctggatatcgccaacaaaacgctaccgctgtttcgccatgtcaatagcgagagtttacgcaaggtctgcgaaattatccgcgatgacattcacgccgatgcggtggcgattactaataccgatcatgtgctggcctatgttggcgtgggtgaacataactatcagaatggcgatgacttcattagcccgactacccgtcaggcgatgaattacggaaaaatcatcattaaaaacaatgatgaagcccaccgcacaccagagattcattccatgctggtgatcccattgtgggagaaaggggtcgtgaccggaacgctgaaaatttactactgccacgcgcatcagatcaccagcagtttacaggaaatggcggtcggtctgagccaaatcatctccacgcaactggaggttagtcgcgccgagcagctacgtgaaatggcaaataaggcagagcttcgcgccctgcaaagcaaaattaatccccattttctgtttaacgctctgaacgctattagtagcagtatccgtctgaatccggataccgctcgccagttgatctttaatctgagccgttatctgcgctataacattgaattaaaagacgatgagcaaatcgatatcaaaaaagagctgtatcaaattaaagactatattgccattgagcaggcccgctttggtgacaagctgacggttatctatgatattgatgaagaggtgaattgctgcattcccagcctgctgatccagccgttggtggagaacgccattgtccacggtattcagccttgcaaaggtaaaggcgttgtcaccatcagcgttgcagagtgcggaaatcgggtacgcattgcggtgcgagataccgggcacggcatcgatccaaaggtgattgagcgggtcgaagcgaatgaaatgccgggcaataaaattggcctgctgaatgtccatcatcgcgtgaagttattgtatggcgaggggctgcatatccgccgcctggagccggggacggaaattgcgttttacattcctaaccaacgcaccccagtcgccagtcaggctacgttattgctttgagccggagtgatattgtgaaagtcatcattgttgaagacgaattcctggcacaacaggaactgagctggctaattaaagagcacagccagatggagattgtcggcacctttgacgacggtctggacgtgttgaagtttttgcagcataaccgcgtcgacgccatttttctggatatcaatattccgagcctggatggcgtgttgctggcgcaaaacatcagccagttcgcccataaaccgtttattgtgttcatcaccgcgtggaaagaacatgcggtagaagcgtttgaactggaggcgtttgactacattctcaaaccgtatcaggagagtcgtattaccgggatgctgcaaaaactggaagcggcctggcaacaacagcagaccagcagtacgcctgccgcgacggtaacgcgtgagaatgacaccattaatctggtgaaagatgagcgaataatcgtcacgccaattaacgatatctattacgccgaagcgcacgagaaaatgacctttgtctatacgcggcgtgaatcctacgtaatgccgatgaacattaccgaattttgcagcaaactgccgccgagccattttttccgctgccatcgcagtttttgtgtcaatctgaacaaaatacgcgaaatcgaaccgtggtttaataacacctacattctgcgactgaaagatctggattttgaagtgccggtcagccgcagcaaagtgaaagaatttcgccagttaatgcatctttaatcgggaactttcatgaaagcaccaggcttgcccgccgatcaacaatttttcgccgatctgttcagcggcctggtgcttaacccgcaactactggggcgcgtctggtttgccagccagcctgccagcttgccggtgggcagtttatgtattgattttccccgtctggatatcgtgctgcgcggcgaatacggcaatctgctggaagcaaagcagcaacgtttggtggaaggagaaatgctgtttattccggcgcgcgcggctaatttaccggtcaacaacaaaccggtgatgctgttaagcctggtgttcgctccgacctggcttgggttaagcttttacgatagccgcaccacgagcttgttgcatcctgctcgccagatccagcttcccagcctgcaacgcggtgaaggtgaagcgatgcttaccgccctcacccatcttagccgtagcccgctggagcaaaatatcattcagccgctggtgttaagtttgctgcatctttgccgtagcgtggtgaatatgccgccgggcaatagccagccgcgcggcgattttctctatcacagcatttgtaactgggttcaggataattatgcccagccgctcacccgcgagagcgtggcgcagttttttaatatcacgcccaatcatctgagtaaactgtttgctcagcatggaacgatgcgttttatcgagtatgtgcgttgggtgcgaatggcgaaggcgaggatgattttgcagaaatatcatctgagtattcatgaagtggcacagcgttgcggttttccggatagcgactatttttgtcgcgttttccggcgtcagtttggtctgacgccgggagagtacagcgcccgttttcagggctaacgtcagaaggttaattctgtttccagcagcgtcaggatactttgtgcatcttgcgcggcaaacaagctctggcggaagtttttattcaccagtttacgcgccagctggctgaagactttcacatgattcatcccttcgttagcacccagcgtcagcatgatcaccagttcgacttcgcccatttcactctgccagccaatcggtttcgccagccgggcaatgctgatactggaatgacggatccactgagatttggtgtgcgggatcgctacgccaaaaccaacgccggtggtaacaatctcttcccgctgccagacatcttcttccagctcaaacggatgttcagtgcgcccgttaacgccgaggttgccgcacaggaactggatcgcctgctctttattgctaaaatcctgatcaacaaagatattctccagcgccagcagtgggcgaacgtcttcttccggcgtaaaggcggtgagtaacgcttcaatttcctgcgcactgcggcattcacatgcctgacgcgccagttcccgacacgcctcgctatccagttgacgaagctggcttttcaccgccggaatacgcgggctactcatactcagctcatccaggcccagcccaagcagtagcggcagataacggctttcaccgcccagttcaccgcaaatgcctacccatttgccccgctgatgcgcagtggtaactatttgctgcaacatgcgcaggaagcttggcgtaatcgggttatatagcgggcttacgcgcgggttattacgatcgaccgcatacagatactgggtcatatcgttggagccgatactgaagaaatcgacctcatcgcagaagtggtcgatgatgtagcacacgctcggaacttccaccatgatcccaagcgtaatcgtctctgcatgacgcaggccatcgcgcttaagctcaacgatcgctttttggatctcgcctttcacccataagatctgatcgaggctgtgaaccatcgggatcatcaactgggcgttgccgaaactggcggcgcgcaaaatggcccgcagttgagtgcggaacaggccagcaaattccgggtaaatacgtaccgcgcgatagccgaggaacgggttctcttcctggggaatattcagataaggaatgcttttatcgccgccgatgtccatcgtgcggaagataatcggcttgtcgcccgccgccagtagcacctgctggtaggcttcaaattgctcctgctcgtccggcgcgctgtcgcgatccatatagagcatttcggtacggaacagcccgacaccttccgcgccgttggcaaacgcgcctggcgcttccagagcggtgccgatattcgccgcaatatcaatacgcttgttatcacgggaataggccagctgcgcggcagcctgcgcctgttgtttttggcgtttatccgccagcgtctgcgcgacctgataataaccgctcaccgcgtcattcgggttaatcgccagcacgccgcactgggcgtcaagcactgcaggttgcccggcataacgggcaatcgcatccagcggcaagccactcagtaccgggatcgcgctggcacgggccagaatcagtgtatggctggtgcgcccggttttctccagaatcatgcccgcaagatttttcaaatcaaggctcaaaaactggcttggggttaaatcttcagccaccagaatggtcggtttttcaagcaccagcttgttgcgcggcttcagttccggccaggtgatatgcagcaactgttcgctgatatcgcgaatgtcgctaacacgttcgcgcagataatcgctggcagaggcagaaagtttggcgcaaacctgctccatattgctgatgatcgccgcccccagcccctgatgctgttctgtcatcaggcgacggatattgcctgcaaattcatcatcctgaatcaggctcaaatgggcgctgaggatagttttgctttcgccgtcacgctcacgcaattgctggttcagttgctcggcaagcgttgccaggctgtgctccagccgggtggaatcttgcgcactggcggggattgcccgataactgtcgaggctgtcgctttgtaacagggtcagcgtacccacgccgacgccgcttgccagcacattgccgtacagtaaatccgggttaaggcggcttaaactacgcggcagcggatgcgccgtcagttctgcctgcgtaggctgaacgctgtcgctgtcgataaagcgcacctggatgtactcttccagcacgcgccgcgcctgctcttcatcgctgccgctaatgttcaggctgcaactgtcattaaatagggtgccggtgccaatcagcgccaggctgcttttcgcatctgcctttgcgttctggcgatggttaataaaagtgatttcgctttgccactggctgcactgttctttaagttcccacgccggacgagcatgtagaccgttaggcaaaggacagagaaattgaatcgttaacataaccgctccgggttaatcaggagatcatctgaaatccgtcagttgaacaaccgtctcacgcgtaagacgttgaataagggcagataaaagttgctgcatctgcaaaatgtcgcggcaatcggcaatgcttgcggcgcaatgtccatggcgggttgctggccccatcaccactgtgggcacgccggtgccggttaagtgcaccgccccgccgtccgtgccgccgttgctgaacatatctgcctgcaacggcacgccaatttctgccgccacggtttcgacccaggcggtaagttttggcggcgcaatcaggctcttgtcgcttaacaccagcatcggcccgttaccaatctggcgatggttagccgcgccataatcaaagtttttcgcccagcaggcggtatcaagcacaatggcgacgtccgggctcaccgcgcgggtggcagtttgcccgccgcgtaatcccacctcttcgctggaacttgccaccagccacacttccgcaggtagttcggcgtcgtgcagttcgcgcagtaacgtcaccagcagatagcaaccgaggcggtcatcaaaggctttccccatcactcgctggtgagggagaacctgaaaagtggtatcaaacgtgacgcgatcgccgggacgaattcccgcctgcatcacttcgtcataggagcgcgcaccaatgtccacgcgcatggcgctgacgtcattcccctgccggtcgccgtcaagcaggcctggaattttgcactcttcacgggtggtgatgcgcaccggctgcagctggcgggcagccatgcgtacgttgccaaccggcagcacatcaatcgccccttcgcgggagatgctgcgcaccataaatcccacttcgtccatatgcgcacagatcatcaccttcggacctgtgctttcattcaggcggatcagcacgcttcccagaccatcaaatcgcacttctttttgcaggcgatccgcttcttccagcaggatctgccgcacttcctgttcgctggaggcgatcgcatctgcctcgctcaacgcttttaataggcttaaatccattatgcctctcccgtgagcaacactgttttcggcatggcgtagagcacttctgcgccttgcggggtaaccagcacaacatcttcgatgcgcacgcccccttgccctggcaaataaatccccggctccacggtcagtaacatgcctggctgtagcgtcgtggtgtcccgcggactaaaacgcggatcttcatgaacttcaatgccgatagcgtgaccggtgttatgaccgaaatagtcgccataacctgcttctgtaatgacccggcgcgcggcatcgtcaacctgctggcagcgcacgccggggcgaatcgcggagattgctgcgagctgtgcctgcaggacaatttgatagacgttaaacagcaggtgagattcggcgctcaccccttcgccattcaccagcaaggtgcgcgtcatatcagagcagtagccctgatacagcgcaccgaaatcgagagtgacaaactcgcccgctgcaacaatcttgtcgctggctttgccgtgcggcagcgccccacgccagccactggcgacaatggtgtcaaaagaggctttttctgcgccctgctggcgcataaaccactccagttcagcggctatctcgcgctcgctcatccccgcctgaataaagcggcgaatatgctctgcaccgcgatcagcaatcccacaggcgaggcggattttctccacctcctctggcgttttgatttgccgcagcacatccggcgtggcgctaaccagtttcgcattgagttcagactgccagcggtgcgcggtttcccaactcacctgctggccctcaaaaccgagcgtttgcaactgttcatcggcaatgatttgattgacgatagtggtaagcgtgttcgtcgcgtcaagcaaatgcagctggtagccttgcgcacgggcttccacctcaacgtaatagcggctatccaccagaatgtgcgcactttcacggctaatcaccacataaccacttccggtggagatccccagatgcggctgtttgttctgccgactggagagaagcactgcatccagttgttgcgccttaagccagtcgcgcaggctagcgagtaatgtcatctggattttccttcttacaggctatcgattaacaatttgcctttacggaacatcatcagacgcaggaacaccaccatcagcgcagttatgactgcccccagcgcgatccccgccatatagacgcccaggttagtgaccagcggccatgcccagatagcggactccgggaaccattgcactgcgcccagccagacagcggcggtactgccgacaatagcgccgaccatatagctcggaatggcggtgatagggctttccagcgcaaacggaatcgcaccctcactgatccccataaacgccaggaacatggcggtcttaccctgcggataaagttgagcgttgaacaggcgtttgccggttaaacgacggtcgataatggtcgccagccccagaccaatcggcggaataacgatagcgatagaacgagcggtgaccggtaatacgtggtcagtggtaaagctgaaggcaacaaaacctgcggctttgttgatcgggccaccaaggtcgattgctgtcgccgcggcgatccccattgcgtacatcagcgcgcccttctcacctgcggcagtcagcacagtacggataccgccgttgatccagccaccaaagggggtgatgacgtagtacatcgccagcatgacaaaaatggcggaaagaatcgggagcaaaaatgtggttttgaacgctaacaggaaatccggtaactggattttctggttcatccacttcacaaggtaaccggcaacgatagaaataatcagcgcaccaatgaaggtggacggcaccgggctagaggtcgcccattgcatagtgctgggatcgaagttcagcagttgcgtcggctgggtagacatcaacccgccgataaaaccagccgggaacgccagtttgccaccgatagagttcgccacaaaagcagcaaacatcggaatggcaaaaccaaacaacacgccgccgaaggactggctcagccaggcaaatttaagtaaggagaggtcgaaaccggagaatttcccgctattaagagcatccatgatgccgatctcagcaggaattttaagccagctataagcaatcagctggctgaaagcgaggatcacaccgcccataattaaggtcggcaccatgcgactaatcccactcatcacatgctgcgggagttcaccccagaagctggttttagaggcctgcggattcttaactgccgctgccgcaccggatgcgccaggcacaacggttgcactgcgttttttaatggccataacaattatccctgtcgaatattactgttgttcagaggcaatcatctcttcgatttctttgatgatgcccgcagcgtttttaattgcgtcctgcaaagtgatttcataaacgtcgcgactttcgaaacgttcgttatcttccggggtaactgccacggagtggatgatgatggtcgcttcggcgatatcctgcgccgtcaggcgattctggataccgtccgcgccctgggtttcaattttcacttcataaccggcttctaccgccgcttcttccagcgcctgagcggccataaaggtgtgagccaggcccatcgggcaggcacataaggcaatcagtttcttactcatcgttaattcctcgttcagtgatagttgacgagtgaaattatgaacgtgcaaaacaaatcgccgttaccagacaaataatgcatttactggagaattaatcccgctgtacggaagtgtgacgcaggtcgaccttgtgaggggacacaaagaaaaattgaataaactgtatgatttaaaagattatcgggagagttacctcccgatataaaaggaaggatttacagaatgtgacctaaggtctggcgtaaatgtgcaccggaaccgagaaggcccggattgtcatggacgatgagatacaccggaatatcatggacatattctttaaagcgccctttatcttcaaatgcggcacggaaaccggaggctttgaagaactcaaggaagcgcggcacgataccgcccgcaataaacacgccgccaaatgtcccgagattgagcgccagattgccgccaaaacggcccataatgacgcaaaacaggctcaatgcgcggcggcaatcggtgcagctgtcagccagcgcgcgttcggtaatatcttttggcttgagattttctggcaggcggttgtcagctttcacaattgcgcgatacaaattcaccagcccagggccagaaagcacgcgctccgcgctaacatgaccaatttccgcacgcaatatttcgaggataatggcctcttcttcactattcggcgcaaaatcaacgtgaccgccttcgcctggcaagcttacccaacgcttatcgacatggaccagatgcgcaaccccaagccccgttccggcaccgtaaaccgcaataggcttaccttcgaccggttctgcgccaccaaactgaatcagatgctcttttttcagcatcgggatcgccatgcttacagcggtaaaatcgttaataatttccagatggctaaaaccgagattctttttcatttcggcaatactgaacgcccaggtatggttggtcatcgccacccagtcaccggtaattgggcaagcgatggcaatacagccgtctttcacctcgaccttatgttcttcaagataaacgcgaatgaccgcttcgaggctggggtaatcaagcccactataggtcttagcctggctgatttcaccactggcaatatcacacagagcaagacgtgcgttggtgccgcccacatcaccgactaatgcatactttgtcattcttcaactgctccgctaaagtcaaaataattctttctcacactgtaaatacctgggggcataacaacaacgccggaaaggcaggctccctgtaaatatcgatctgggtcacacaattactttatcgtttcagcaccaattgcagcgatgcctttttgcaagctgggcaaactaagtatctgaccccgcataaggaatagaacacaggcggcactaacccggacgtagactgtattacaaaagcggcaaaaagcagagacaaaaaacccccgctttgcagcgagggttggaaatttggtggagctaagcgggatcgaaccgctgacctcttgcatgccatgcaagcgctctcccagctgagctatagccccacgatgcgtttacgtaccaagtttgctgggtgcaaaatttggtggagctaagcgggatcgaaccgctgacctcttgcatgccatgcaagcgctctcccagctgagctatagccccgtcacgtaaagcttgtcgagttgacgggcggcatcatatgaattccgcccgaatgtgtcaacggcaaattgcaacgtgtagtttcaatcgctgaaaaatcaggcaaatgaacaattttggaaaaccgctcgcattcagtagttattcatgtcacggtttcctgtaaagtggtgttataaaatgaactactaatagacccacatacattcagggaattgttatgttcaaggagaggatgacaccagatgaacttgccagactgaccggctatagccgccagaccattaataaatgggtacgcaaggaaggctggacaacgagtccaaaacctggcgtccagggtggcaaagcccgactggttcacgtcaatgaacaggttcgtgaatatattcgcaatgctgaacgtccagaaggtcagggagaagcgcctgccctttctggtgatgcgccgcttgaagtattgctggtgacactggcgaaagagatgacgccagttgaacaaaaacagtttacatccttgcttctgcgggaagggattatcggattgttacaacgcttagggattcgcgatagcaaataatatgaaaagattacgcaataaaatgaccaccgaagaactggctgaatgcctcggtgtggctaaacaaactgttaaccgttggatcagagaaaaaggctggaaaacggaaaaatttcccggcgtgaaaggcggtcgtgccagacttattctggtcgatacgcaagtttgcgagtttattcagaacacgccagccttccataacacaccaatgttgatggaagctgaagagagaattgctgaatacgctcctggagcacgcgccccggcgtatcgacaaatcatcaacgcgatagataatatgacagacattgagcaggaaaaagtcgcgcaatttttgagtcgtgaaggaattcgcaatttcctcgcccgtctcgatattgacgaaagtgcataaataaaaaacggcaggatattatctcctgccgtttatctttttacacgctaattactgctgattttcgcgttcagcaataaaatccagcgctttgttgatacgctcgatactgcgggtcttaccaattgcgtgaacggtaacatccagtgctggagactgccccgcaccggttacggcgacacgcagcggcataccaactttacccatacccacttccagctcatccgccgtcgcctgaatagcgtgatgaacgttttcagcggtccagtcagtaatcgcggccagtttgtcacgaaccacttccagcggctgacgcgctaccggacgcagatgttttttcgcggcgtcggcatcgaactcagcaaaatcttcgtagaaataacggcagctctgtgccatctctttcagcgtcttgcagcgttcgcccagcagtttcaccagatcagccagctgcgggccgttacgggtatcgatattttcctgctcaatgtgccactgtaagtgagtagcaacatactccggcggcagcgcgttaatgtagtgatggttcagccacagcagcttgtcggtgttgaacgcactggcagatttgctgacggcattcaaagtgaagtatttgatcatctcttcacgagtgaagatttcctgatcgccgtgggaccagcccagacgcaccagatagttcagcagtgcttctggcaaataaccgtcatcacgatactgcattacgctgactgccccgtgacgtttggacagttttttaccgtcatcgccattgatcatagaaacgtgcgcgtaaaccggcaccggcgctttcagggccttaagaatgttgatctggcgtggcgtgttgttgatatggtcttcgccacggataacgtgggtgatttccatatcccagtcatcgacaaccacacagaagttataggttggggaaccatcggtacggcggataataagatcgtccagttcctggttgctgaactcgatcggaccacggatctgatcgtcaaaaacaacagaaccttcctgcgggttagcaaaacgtacaacacacggttcatcatcagcatgatgctcatggctgtggcggcagcgaccgtcataacgcggcttctcacctttcgccatttgctcttcgcgcagcgcttccaggcgctctttagagcaatagcatttataagcagtgccctcttccagcatctgatcgatcaccgcgttgtagcgatcaaaacgtttggtctggtagtacggaccttcatcccactccaggctcagccagttcatgccatccataatggcttcgatagcttccggcgtggaacgctcaagatcggtgtcttcaatacgcagcacgaactcaccgccgtggttacgtgcaaaaagccaggagtaaagagcagtacgcgcgccgccaacgtgcagatagcctgttgggcttggcgcgaagcgagttttgattttcatgaaatggccttacgtttagaaagatgccgacaaccggcaaatcctggaaaaattaagtgggcgatattctatcactcccgcctgattcctcaatgtagttcgggtttctaccttacgcattattgttttcgttgacaaattgcgcaacacggtctgttttgcgatcatcttgcttaaatttacgacgaacgaacaatttctttagaaaatgcgttgactcattttgaactctccctataatgcgactccacacagcgggggtgattagctcagctgggagagcacctcccttacaaggagggggtcggcggttcgatcccgtcatcacccaccaactactttatgtagtctccgccgtgtagcaagaaattgagaagtgggtgattagctcagctgggagagcacctcccttacaaggagggggtcggcggttcgatcccgtcatcacccaccactttctcgccagctaaatttcttgtaaaaatgtgaagtaccgaagtgggtgattagctcagctgggagagcacctcccttacaaggagggggtcggcggttcgatcccgtcatcacccaccacttcgggtcgttagctcagttggtagagcagttgacttttaatcaattggtcgcaggttcgaatcctgcacgacccaccaatgtaaaaaagcgccctaaaggcgcttttttactatctgcgatactcaaagattcgaacctgcagcaggtttgagttgagcgcagcgaaacaacggagccgctcgtgctggcgacggcccgaagggcgagcgaagcgagtcatcctgcacgacccaccaatgtaaaaaagcgccctaaaggcgcttttttgctatctgcgatttgcgaaattgcctgatgcgcttcacttagcagactactatttccggcaattcctgtctcctcacttactgtgtcaatgcagccaacagcttaaccatcgcgggcgtcacctgctgtgtttcataaacaatatataaatctgcagggatgcgctgtttgagcggacggaaaatgacacctggccagttcatttgtgcgtagctgtccgctatcaatgtgataccaatgcccatactgaccatagcgagtaccgtttgcggttcattaacttcgcgaataacaaccggactaaatcccacctgctggcaaactcgctgcaaaaaatcccagtcagtgtaaacgggcggcattgtaacaaaatactcgtcacgtagcgcttccagcgggacggtggaaaaactactgagatgatgctcttcaggcatcgccaccagaaacgcgctttcatgcaaccgtaagctggtaaaaccagtcggtggttctgtcgccattcgccagatcccggcatcaagttcgcggcgttccagcaaggccatttgcatcgcgggcatcttttcgcgaaaaagaacgtcaacgttaggattttccctgaggaatcgccgcataaccgggcgcatccgtccccacattgccgttcccactacgccgagttcaatccgccctgcttctccccgacctatttgttcaatccgagccaatacattattagcattcaccagcaatcgacggctttcttccatcaagattttgcccgcgtgtgtcagtacgacgctgcggctatggcgaataaaaagctgcgtgccgagttgattttccagctctttaatatgaatgctgagcggaggctgagacatatttaaacgcgctgctgcgcggccaaaatgcaactcttccgctacggcaagaaaataacggagcaacttaagatctgttctgtatacgcgttccataattaagtgctccatataataaatacatcgtattaaattatcatggcataaagtatttcaccaccagatatccgacatacataaacacaatggataatatacccggtaatacatttggtacaggaataggcaagcgcacgattgtaaacaaagcaccaataccaaaaccaacgccggaagaaaataaaatatctttcactaattaacctttatcataaaagcagctctgaagagcagagccgcgaatccttttaatgagtcaccgctcgatgctttatcttttcagggtcatgattatatttaaacccaaagaaaaatatcactgcgagaaaaagagcatatcctgcaaacaccagccagatagtttgccagtcttttacgccatccacgctaaagtaatctactgccatgccactcagaatgctgccaacccatgcgccgacaccatttaccatggtcataaagagcccctgcgcgctggcacgaatgctggaatcaacttcctgttcgacaaatacgctaccagaaatattgaagaaatcgaatgcacagccataaacaatcatgctcagcagcagcaaaataaatccggttgtactcggatcgccataggcgaagaagccaaagcgcagcgtccaggccaccatactcatcagcatgacggttttaatgccaaatcgctttaaaaagaatgggatagtcagtataaagcccacttctgccatctgactaacactcagtaaaatggagggatatttcaccacaaaactgtcagcaaactccgggttacgggcgaaatcatgtaggaacggattaccaaaaacgttggtaatttgcagtaccgcacccagcatcatggcaaagaggaaaaagatggccatgcgtggatttttaaacagcacgaaggcatccagacccagcttgctggcaaggcttgtggtcgcttttttctccgcaaccggaatcttcggcaaagtcagcgcataagcgctcagcagcaaactcgcaccggacgcgatatacagctgcagactactcaattccagatgcagcaggcttactgcccacatcgcgacaatgaaccccaccgtaccaaaaacgcgaatgggcgggaaagcggtcaccgggtcaagccctgcctgggcaagacaggaataagagacgctgttgcttaacgcaatagtcggcataaacgccatcgcattgactaacatcacccaaaacatcatatccggatcagttacggatgccgcataaaaaagtacgcccgcacacaccaggtgacacagcatgtatgcacgttctgcgcgcagccatttgtctgcgatgatccccattataccaggcataataatcgcggcgatccctttggaactgtaaaccatgccaacattagcgccggtgaaatgaagagtattaatcatgtaagagccgagggtaaccagccagctcccccagataaaatattgcaaaaaggacattacctttaagcgcatcgcgatgctcataatcgtttccttgtcgcatcatttggcctcacccgcgaggccgtttcttattgtttttctcaggcaattttgcgcagaaagccacaaataaggttgatgaagttctgcttagagagctccgcagccgccagcgtttgcgcatgactcaatttcacatcgcttaaaccttccgccatattggtaatcgcagagaccgcaacgactttaaggtcgcaatggcgagcactaataacctcaggcaccacagacataccaacaacatccccaccaataatttgcatcatgcgaatttccgccgcagtctcgaaattcggccccggatagctgacgaacacgccctccgtcagagggaaaccctcctctttcgccactttttgtaacagtgcgcggtattccgcatcgtaggcatttgccagactgaagaagcgctctccaaaacgatcatcgttaagacccaccatcggcgtaccgggcatggtgttgatatgatctttcaatgcgaccaggctgcctgcccccacttccggacgcaggctgcctgccgcattggtgcagaacagtagctcgcagcccagcagcttaaaggtacgaattgcgtcagtcataatggtcattccacgaccttcgtagaaatgtccgcgacctttcatacataccaccggtacgccctggagatggcccagcactaactcccccgcatgaccatgtaccgtacttaccgggaagcccggcagcttttcgtaggaaattgcgacagcgttctcaatctgatcggccagcgcgccgagcccggaacctaaaataaaggccactcgtggcgtgaaatcaggtttataagtcttgataatatctatgcaaaacagcgggttatgagaaaattgaacctgagacatacatatcctttttctgtagggtggaatctaacgcctttttatagcgaggttgtcccggctcttaccaatacacttttctcacgcattcaatagcgattcgatatcgatggatttatatcttttttctattaatccacggtaaaaactgtattggcgatattaattcctttgcattaacaatatgtcgtttttagcaaaccactttattaagcaatctactaataacgatcggcatagggaattatgctatgaaaaaacatcttttaactctgacactttcctctatattagcgatacctgttgtatctcatgcagaatttaaaggcggttttgcagatatcggcgtgcattatctggactggaccagccggactaccgaaaaaagcagcaccaaaagtcacaaagatgattttggttatcttgaatttgaaggtggcgctaactttagttggggagaaatgtacgggttcttcgactgggaaaacttctataacggtcgccataataaaccaggtagcgagcagcgttatacctttaaaaataccaaccgtatttacctgggtgacaccggatttaatctctacttgcatgcgtatggcacctacggttctgcgaatcgcgtgaatttccacgacgatatgttcctgtacggtatcggctacaatttcaccggcagcggttggtggttcaaaccgttctttgctaagcgttatacagatcaaacctattacactggcgacaacggctatgtcgccggctgggttgcaggttacaactttatgctgggcagcgagaaattcactcttaccaactggaacgagtacgagtttgaccgtgacgctacctatgcagcgggtaatggcggtaaagaagggctgaatggcgcagttgcactgtggtggaatgcaacaagtcacattactacggggattcagtatcgatatgcggatgacaaactgggcgaagatttttaccaggatgcgataatctactccatcaaatttaacttctgattgattactgccggggctcccggcagtatgaattcactttatatctgatacaacggatccccttcccgcccagccattagcgcattgccctggtctcgtaccacgtcccataaagcttcagcggcggtggaaagactacggttcttcctgcgcaccagcatcaactggcgttcaacaaccggcgtaatgcgctttaccaccagtgggctaccttcaggcaatggtagcgccagtgcgggaagaatactgatgccgatgcctgcggctaccatcgggaacagcgtcgccggatgtccaatctcctgcacaatattcgcctgaataccattgcgcgccagcgctgcgtcaatcagcggtcggctgccactcgcgtaatcctgcaacaccaatttcgctccctgtaatgcctgccagggtacataatcttccacggccaaagcgctatcgcgatggcaaagcagaaagaaaggctcggaaagaatcgcttcacattgcagatcgcccactgggcctggatcgatgacgatgccaaaatcgacatctccctggcgaatactttccattacccactgctgcggacgatcgtgcaggacaaactgaatatctggatagcggcgatggctttcagcaatgcattgcggaataagatgcgcggaaatggtctggctggcagcgacccgaacttttccgctcagttgttgccccatacgcccggtatcgcgcaacgtgctgttcagttcatccagcagtcgctcaagacgcaaagccagctgctgccctgcatctgtaagcaccacttcacgcgtggttctgtccagcaggcgaacaccagtatgattttccagttccttcacactgtgactcactgcgctctggctcaggccgatacgctctcctgcacgactaaaacttttctcctgcgctactgtgacgaaaacctttaattgttttaaagaataattcatctgttttcttcatgaatggatgcaataaatcaattttatttctcaaactggaagaagcacaatagaaccatcgatcatctggagtctttatgaaactttttcgtatcctcgatcctttcaccttaaccctgatcacggtggtgttgctggcctctttctttccggccagaggcgatttcgtccccttctttgaaaatctgaccaccgcagctattgccctgctgttctttatgcacggcgcgaagttgagccgtgaggcgattattgctggcggtggtcactggcgactgcatttgtgggtaatgtgcagcaccttcgtgctgtttccgattctgggtgtactgtttgcctggtggaaaccggtaaatgtcgacccgatgctctactccggttttctctacttgtgcattctcccggctaccgtgcagtctgcaatcgccttcacgagtatggcgggcggtaacgtcgcggcagcggtttgttctgcgagcgcatccagcctgctggggattttccttagtccattgctggttggtctggtgatgaatgttcacggtgcagggggcagccttgagcaggtcggtaaaattatgctgcaactgctgctgccgtttgtgttggggcatctttcccggccgtggattggtgactgggtgagccgcaataaaaaatggattgcgaaaactgaccagacgtccattctgttggtggtttatacagcgttcagcgaagccgtcgttaatggtatctggcataaagttggctggggaagtttgctgtttatcgtggtggtcagctgcgttcttctggctatcgtgattgtagttaacgtctttatggcacgccgactgagcttcaataaggcagatgaaattactatcgtcttttgtggtagcaaaaagagtctggcaaatggcatcccgatggcaaacattctgttccccacaagcgtgatcggtatgatggtgctgcccctgatgattttccatcagatccaattgatggtctgtgcggtgctggcgcgtcgatacaaacgccagaccgaacagttacaggcgcagcaggaaagcagcgccgataaagcttaaagcggacgcttcaggggctggaccagttgcgtcagcccctcggttttaatcagcagcgtgatttgcattagctcaccgagcttccctgccgggaactcatctttgcgggcaaaccacagcagatactcctccggcaggtcgattaagcgacgccctttgtatttgccaaacggcattatcgtattggctatttcaatcagctgctctttttccatctcagctacccagcaaacgcagcatttccgcttcgtcgatgacttcaatgcccagttcctgcgccttcgccagtttagatcctgcagcttcacccgctatcaccagatcggttttcttgctcacgctgcccgcgactttcgcgcccagttcgaccagtcgagctttagcgtcatcacggctcatctggcttaagctgcccgtaagcaccacggttttaccagcaaacgggctgtcaatctcttccgcgttgataacgatcggcgcaggccagtgaacaccttccgccaacagctcgctgatgacattgcggttgctttcttcggcaaagaagttgtgaacgtgggatgcaacgacaatgccaacatcaggcaccttttgcagctcttcaatgctagcggcttccagcgcttccagcgtgccgaaatatgccgccagacctgctgcggtggcctcgccgacttcacggatgccaagtgcatagaggaagcgagcaaaggtggtttctttcgctttttccagcgcgttaaccacgttttgtgcgctttttggccccatacgctccagtccggtcagtttgcctgcggtgagtttgaacagatctgccggagtatggacatattctttttcaaccagctgatcgatgattttgtcgcccattccgtcaacatccatcgcacggcgggaaacaaagtgtttcaggctctctttacgctgcgcaccgcaaatcaggccaccggtacagcgggcaaccgcttcaccttccacacgctcaacgtcagaaccacataccggacaatgcgtcgggaatacaacctcacgggtatcttccgggcgttcagaaagcacgacgttaaccacctgcgggatcacgtcgccagcgcggcgaatcaccactttatcgccaatgcgtaaaccaagacgttcgatttcatccgcattgtgtaaggttgcgttactcaccagcacgcctgcaacatggacaggttccagacgcgcaacaggcgtaatcgcgccagtacgcccaacctgaaactcgacgtcacgcacaaaggtcatctgctcctgcgccgggaatttaaacgctaccgcccagcgcggggcacgcgcgacaaagccaagctgctcctgctgtgccagactgttgaccttaatcaccacgccgtcgatatcaaagcccagcgtcgggcggtcttcttccactttgtgatagaacgccagcacttcttccgcgctttcacaaagcgttacccgatcgctgaccggcaacccccactttttaaattgcagtaaacggccaagatgagtatccggcagctcgccaccttccagaacaccaacgccatagcagaaaaaagtgagcggtcgcttcgctgtaatacgcggatcaagctgacgcagactaccagctgccgcattacgtgggttagcaaacactttcccgcccgtgcgtcgcgcatcttcgttaatcttttcgaaccccgcctgcggcaggaacacttcaccacgcacttccagacgcgccgggatattctctccgtgcagcttcagcggaatggcgcgaatagtacgcacattagacgtgatatcttccccggtggtgccatcgccacgggtcgcggcactgactaaaacgccattttcatacagaatactgacggcaagaccatccagcttcagctcacagcaccaggtgactttctcgttgtttttcagacggtcctgcacacgtttgttgaaagcaagaaagctttcttcatcaaaaacgttatccagactcagcattggtacttcatggcgtatctggctgaaagccgccagcggcgcagcgcctacacgttgagtagggctatcaggcgtaatcagttctggatgtttggtttccagctcgcgcagttcgcgcatcagcctgtcgtattcagcgtcgggaatttccggcgcatccatcacatgataaagatattcatgatggcgaagcgtcgttcgcagttctgtcagttgttgttcgatactttccatatcgcaccatcaatgctaaaaacccccgacaagcgggggttcgaagaggagttaatttgccttaagtgtatcaggcgttggcgtctttgacttcgcggatgatgtcctggtactcgcgcaatttctgcggagtcatcatacggcgctgatcgtcaagcacgacaccgcccacttcatcggcaatatgctgcgcagattgcagcatcagcttgaagttctgcagctcgtcaccgtaagacggtacctgcataaagatagtgacacccggagtagtgaaatccttcatttcaggatcaaaggttcccggtttcaccatattcgccaggctgaataacgccgggccgctgccatccgggctaagatgacgatggtaaatattcatatcgccaaaaatgaagcccgcttgttgaatgctgttaagaagcagttcaccgtttagctcgctaccgtgatgcgccgcgacgttcatgataatcaccgcttctttgcgcttcggtttatccataactggagcaggttccgctacaggctcaggctgtggtgccgctacgggttctgcaggctggaaagcctgttgtgccggttgcggtgcactatgcacaggctgcggcgctggcgcgacctgtgggctaactggctgctgcaacggctgttcaggctgcggctgataggcaggctgctgcaccggctgcgctggatgcggagcatgttgcggcggtacctgcgcttcaggcggctgctggaccggttgacgcggctgcgcagacgcataaggcggttggtactggtgttgcgggctcggacgagcagcctcatgctcctgagcgttagccggggcatgattcacgcggtgaacacgaacctcaccaacgccctcatcatcttcgacatcctcgtcataagaatcgtcgtcacgtttactcttcattcgttttaatggccgatcgcggaacatagaagatcgttctttacggctggtccagaaaccatgtaccagtaaagcgattatggcgatcgcgccaacaatgattaatatcagacgcaaatcctgcatcattatattctctgttgttctaacaccttgccaccacggcaaacatttactcactaagagtatttgccgattacctcaagtgcaagtgcactattaactttcacagcacaaagatagatgaaatcgtgctttttgctgttttttcgaacatatcctaactgtccattgcgcaattacccggtaaaatacgcagaattttcctgggattggtcaaaaggagctcatcctgattatggttagtagtttcacatctgccccacgcagcggtttttactattttgcgcaaggctggaagctcgtcagccaacctgggattcggcgtttcgttattttaccgctgctggtcaatattttgttgatggggggcgcattctggtggctctttacacagctcgatgtctggatcccgactctcatgagttacgttccggactggctacaatggctgagttatctgttgtggcctctggctgtcatctctgtgctgttagtgtttggctatttcttctccacgattgctaactggattgccgctccgtttaacggtttattggctgaacaactggaagcacgattgactggcgctacaccgccagataccgggattttcggtatcatgaaagatgtgccgcgaatcatgaaacgcgaatggcaaaaatttgcctggtatctgccgcgcgcaattgtattactaattctttacttcatccctggtattgggcaaaccgtcgcgccggtactgtggttcctgtttagcgcctggatgttagccatccagtattgcgattaccccttcgataaccacaaagtgccgtttaaagagatgcgcaccgccctgcgcacacgcaaaatcaccaatatgcagtttggtgctttaaccagcctgtttacgatgatcccgctgcttaatctgttcatcatgcccgttgccgtttgtggcgcgacggcgatgtgggtcgattgctatcgcgataaacacgcgatgtggcggtaacaatctaccggttattttgtaaaccgtttgtgtgaaacaggggtggcttatgccgccccttattccatcttgcatgtcattatttcccttctgtatatagatatgctaaatccttacttccgcatattctctgagcgggtatgctacctgttgtatcccaatttcatacagttaaggacaggccatgagtaagatttttgaagataacagcctgactatcggtcacacgccgctggttcgcctgaatcgcatcggtaacggacgcattctggcgaaggtggaatctcgtaaccccagcttcagcgttaagtgccgtatcggtgccaacatgatttgggatgccgaaaagcgcggcgtgctgaaaccaggcgttgaactggttgaaccgaccagcggtaataccgggattgcactggcctatgtagctgccgctcgcggttacaaactcaccctgaccatgccagaaaccatgagtattgaacgccgcaagctgctgaaagcgttaggtgcaaacctggtgctgacggaaggtgctaaaggcatgaaaggcgcaatccaaaaagcagaagaaattgtcgccagcaatccagagaaatacctgctgctgcaacaattcagcaatccggcaaaccctgaaattcacgaaaagaccaccggtccggagatatgggaagataccgacggtcaggttgatgtatttattgctggcgttgggactggcggtacgctgactggcgtcagccgctacattaaaggcaccaaaggcaagaccgatcttatctctgtcgccgttgagccaaccgattctccagttatcgcccaggcgctggcaggtgaagagattaaacctggcccgcataaaattcagggtattggcgctggttttatcccggctaacctcgatctcaagctggtcgataaagtcattggcatcaccaatgaagaagcgatttctaccgcgcgtcgtctgatggaagaagaaggtattcttgcaggtatctcttctggagcagctgttgccgcggcgttgaaactacaagaagatgaaagctttaccaacaagaatattgtggttattctaccaagtagcggtgagcgttatttaagcaccgcattgtttgccgatctcttcactgagaaagaattgcaacagtaatgccagcttgttaaaaatgcgtaaaaaagcacctttttaggtgcttttttgtggcctgcttcaaactttcgcccctcctggcattgattcagcctgtcggaactggtatttaaccagactaattattttgatgcgcgaaattaatcgttacaggaaaagccaaagctgaatcgattttatgatttggttcaattcttcctttagcggcataatgtttaatgacgtacgaaacgtcagcggtcaacacccgccagcaatggactgtattgcgctcttcgtgcgtcgcgtctgttaaaaactggcgctaacaatacaggctaaagtcgaaccgccaggctagactttagttccacaacactaaacctataagttggggaaatacaatgttccagcaagaagttaccattaccgctccgaacggtctgcacacccgccctgctgcccagtttgtaaaagaagctaagggcttcacttctgaaattactgtgacttccaacggcaaaagcgccagcgcgaaaagcctgtttaaactgcagactctgggcctgactcaaggtaccgttgtgactatctccgcagaaggcgaagacgagcagaaagcggttgaacatctggttaaactgatggcggaactcgagtaatttcccgggttcttttaaaaatcagtcacaagtaaggtagggttatgattagtggcattttagcatccccgggtatcgctttcggtaaagctctgcttctgaaagaagacgaaattgtcattgaccggaaaaaaatttctgccgaccaggttgatcaggaagttgaacgttttctgagcggtcgtgccaaggcaagtgcccagctggaaacgatcaaaacgaaagctggtgaaacgttcggtgaagaaaaagaagccatctttgaagggcatattatgctgctcgaagatgaggagctggagcaggaaatcatagccctgattaaagataagcacatgacagctgacgcagctgctcatgaagttatcgaaggtcaggcttctgccctggaagagctggatgatgaatacctgaaagaacgtgcggctgacgtacgtgatatcggtaagcgcctgctgcgcaacatcctgggcctgaagattatcgacctgagcgccattcaggatgaagtcattctggttgccgctgacctgacgccgtccgaaaccgcacagctgaacctgaagaaggtgctgggtttcatcaccgacgcgggtggccgtacttcccacacctctatcatggcgcgttctctggaactacctgctatcgtgggtaccggtagcgtcacctctcaggtgaaaaatgacgactatctgattctggatgccgtaaataatcaggtttacgtcaatccaaccaacgaagttattgataaaatgcgcgctgttcaggagcaagtggcttctgaaaaagcagagcttgctaaactgaaagatctgccagctattacgctggacggtcaccaggtagaagtatgcgctaacattggtacggttcgtgacgttgaaggtgcagagcgtaacggcgctgaaggcgttggtctgtatcgtactgagttcctgttcatggaccgcgacgcactgcccactgaagaagaacagtttgctgcttacaaagcagtggctgaagcgtgtggcagccaagcggttatcgttcgtaccatggacatcggcggcgacaaagagctgccatacatgaacttcccgaaagaagagaacccgttcctcggctggcgcgctatccgtatcgcgatggatcgtagagagatcctgcgcgatcagctccgcgctatcctgcgtgccagcgctttcggtaaattgcgcattatgttcccgatgatcatctctgttgaagaagtgcgtgcactgcgcaaagagatcgaaatctacaaacaggaactgcgcgacgaaggtaaagcgtttgacgagagtattgaaatcggcgtaatggtggaaacaccggctgccgcaacaattgcacgtcatttagccaaagaagttgatttctttagtatcggcaccaatgatttaacgcagtacactctggcagttgaccgtggtaatgatatgattagtcacctttaccagccaatgagtccgtccgtgctgaacttgatcaagcaagttattgatgcttctcatgctgaaggcaaatggactggcatgtgtggtgagcttgctggcgatgaacgtgctacacttctgttgctggggatgggtctggacgaattctctatgagcgccatttctatcccgcgcattaagaagattatccgtaacacgaacttcgaagatgcgaaggtgttagcagagcaggctcttgctcaaccgacaacggacgagttaatgacgctggttaacaagttcattgaagaaaaaacaatctgctaatccacgagatgcggcccaatttactgcttaggagaagatcatgggtttgttcgataaactgaaatctctggtttccgacgacaagaaggataccggaactattgagatcattgctccgctctctggcgagatcgtcaatatcgaagacgtgccggatgtcgtttttgcggaaaaaatcgttggtgatggtattgctatcaaaccaacgggtaacaaaatggtcgcgccagtagacggcaccattggtaaaatctttgaaaccaaccacgcattctctatcgaatctgatagcggcgttgaactgttcgtccacttcggtatcgacaccgttgaactgaaaggcgaaggcttcaagcgtattgctgaagaaggtcagcgcgtgaaagttggcgatactgtcattgaatttgatctgccgctgctggaagagaaagccaagtctaccctgactccggttgttatctccaacatggacgaaatcaaagaactgatcaaactgtccggtagcgtaaccgtgggtgaaaccccggttatccgcatcaagaagtaattcttgccgcagtgaaaaatggcgcccatcggcgccatttttttatgcttccgccagcggcggcaaaatcaattcatcgctctcatgctgctgggtgtagcgcatcacttccagtacgcgcaaccccgctcggtgcactgcatcggttaacgccttccctttcagcaagccactgatgagctgagcacaaaacaggtcgccagtccctttcaggtcggtttttacccgactatgggaaatgacattcacgctgtcggcagtgaccaccacaacctgcatctcctgattttcttcattaccggaggcgctggtaaccaccacccattttaatgtgtcactaagcagactttttgcggcagcaatggcactgtcgagatcgcggcaatttttaccggtcaggatttccaactcaaagatattgggggtaattccctgcgccagcggcagtaaatattgtcgatacgcttcgggaaggtcaggtttgacataaattccgctatcaatatcgtcaatcaccggatcgaccatgatcaataggtcaggatggtctttgcgtagcgcagtcagccactcggcaaggattttgatttggcttgccgttcccatatagcccgtggttacagcacgaagttggcgcagcgcatcacgctcctgaagcgcacgcaaatagccgctaaaccattcgtccggaatcgcaccaccgtagaaagtgtcataatgcggcgtattgctcagcaataccgtcggcacggcaaagacattcaggccgttctgtttgatagcaggcacggcaatgctgttgcccacgctgccgtaaaccacctggctctgcacggcgacgatatccgcctgcagtgccctactcttatcgttaaacaacaacaaactactcatttaattttttctccttgccgatgatcctcatcgtaatccaaccgaaactttacctgattctggcagtcaaatcggctatcacaaaacaaggataaggtaattcaatgaagaaaatcatttgtctggtcattacactactaatgacactccccgtttacgcgaagttaactgcccatgaagaagcccgcatcaacgccatgctggagggattagcacagaaaaaggatttgatatttgtgcgcaacggtgatgaacatacctgctatgaagcggtttctcatctgcgtctgaagctcggcaatacccgtaaccgcattgacactgccgagcagtttattgataaggttgctagcagcagtagcattactgggaagccgtatattgtgaagatccccggtaagagcgatgagaacgcacagccttttttacatgcgttaattgcgcagacggataaaacggtgcctgcggaaggaaattaatccgctttgggaaggcatttacaggaggtaacatgaaaaaacgctttatttatcacgatgaaaaaagcaataaattttggtggatagattacgaaggggatagtttagctgtcaactatggcaaggtaggtagtattggtaaattccagacaaaagagttcgataatgaagaacagtgtctgaaagaagccagtaaattgattgccgcaaaaatgaagaaaggctatcaagaagatccaaagtttaacttcatggatcgctactattttgatgatgaagaaattgggttacatgttaaaacgagtcacccaaacttccagtgccattttactgatccactttatatgtgttgctgggatgaagaatctccttttggcagcgatgaaggtgctgatgctctaaacgttcttgaaaatagcctccgtaaagagccggatctggactgtgctgatttccctcaaatgttaattgaaactatgtggggtatgaaatacatcgctatggacagtattcttgaagaggatgttcgtgcgcaattactagtcgatgaaatgagcactatccagagcaatatgattacctacgcaactgcattcggtcagattaaagtcatgggtaaaatctcccataaacttaaaaagatgggactcaatgcactagcgcgtcatcagcttaccgcaaaaattcttcaatggggtgacggtcaggacagtccaatacttcaaaaaatgattgatgaccttacggcgtttcctcacgaaaattaaatactgcatttgtcggcagcaacaactgttaaaaaagtgcgctttgtttatgccggatgcggcgtaaacgccttatccggcctacaaaatcgtgctaattcaatatattgcagaaaccttgtaggcctgataagcgtagcgcatcaggcagttttgcgtttgtcatcagtctccgatgctattaatccttaaatccccgccccctggctaaaatgctcttccccaaacaccccggtagaaaggtagcgatcgccacgatcgcagatgatcgccaccaccaccgcgtcagggttagcttttgccacccgcagtgctccggcaaccgcgccgccggagctgacgccacagaatattccttcccgcaccgccagttcgcgcatggtgttttccgcatcgcgctgatgaatatccagcacctcatccaccagagaagcgttgaaaatccccggcagatattccgtaggccagcggcgaatgccgggaatgctgctgccctcttccggttgcaggccgacaatggtcaccggtttggattgttcgcgcataaagcgactgacgccggtgatagtgccggtcgtccccatgctggagacaaaatgagtgatgcgcccgccggtttgctgccagatttccggcccagtggtggtgtaatgcgcataagggttatcgggattattgaactgatcgagcagctttccttcgccacgattcgccatctccagcgccagatcgcgcgcaccttccatgccctgctctttggtgacaagaatcagttccgcaccataagcacgcatcgccgcacggcgttcctggctcatgttgtcgggcatcagcaatttcatgcgatagcctttcagcgcggcaatcattgccagcgcaatgccggtgttaccactggtggcttcgattaagacatcacccggtttaatttccccgcgcttttccgcctcgacgatcatgctaagtgccgcacgatctttcacgctacctgccgggttattgccttccagttttaaccacacttcactgccgttatccggccccattcgctgcaacttcaccagaggcgtattgcctattgtttgttctaatgtactcacgatctctatccatacgtggtgttgcctgatgcgacgcttgcgcgtcttatcaggtctacaggttacaaaccttgccattaaaaagcccggatcgcgggaagcgcctccgggcgtttaacattcactcaacctatcaggcgctttgtgcgagagcaagttcctcatcgcgggtttcgatacgctcgtcgccgttatacagccgcgcatgttgcagaccaacgaataaacgctcgccacgctgcggggcatcgtcgccatgcatcacgaccgtcagcggttcgttgtaccaccccagcggctgcaccactaattgggtgtagtgacctttcgggctggcttccagtacctgtaccggcagcgggctatcgaggctggtacggcggctgatatccacttcccaagggcgcaggaagagatccaccggcccctgatacgcaggtgtgtagcccagcggccagcgatgcgcgccaacatggaactgcccgccgcgaatggttccctgcaggcggttcacttcgcccataaattcgagcacaaaacggatcgccggttcgcgccatacctgatccggcgcgtcagcctgttcaatattgccctggctcatcacaactacacgatcagctacttcggtcgcttcttcctgatcgtgggtcacaaaaacgctggtgaattttagttcttcatggagttgacgcagccagcgacgcagctctttacgcacctgcgcatccagcgcgccaaacggttcatcaagcagcagaatttgcggttccacagccagcgcgcgcgccagcgccacgcgctgtttctggccgccggaaagctgcgccggataacgatccgccagatgggcaagctggaccatttccagcaattttgtcactttcgctttgatggctgcggcattcgggcgctcgcgacgcggcagcaccgtcaggccaaaagcgatattgtcgaacaccgtcatatggcggaacagcgcgtaatgctggaacacgaaaccgactttacgatcacgtgcgtgcaggcggctcacgtcggtgccgtggaagcgaatatgcccgctggtttgatgctccagcccggcgataatgcgcagcagcgtggttttcccggaaccggacggccccagcaacgcgaccatctgaccactaggaatatccagactgatatcgttcagcacctgggtgcgaccaaagctcttcttaatattggcaatctcaatgctcatgatgttcctcctgctgtgcgcgtttttcctgattctccaggcgccactgcaacatactttttaaaaacagggtgataatcgccatcagcgttaacagcgccgcagcggtaaaggagccgacggtgttgtagtcctgctccagcaattcaatctgtaacggcaggctcagggtttcgccgcgaatgctgccggaaaccacgctcaccgcgccaaactcgccaattgcgcgggcgttggtcaacaccacgccataaagcagcgcccagcggatgttcggtaatgtgacgcgacggaacatctgccagccggacgcgccaagcaaaatcgccgcttcgtcttcctggctgccctggcttaacatcaccggcaccagttcgcgcaccacaaacggacacgtcacgaagatggtgaccagcaccattcccggccaggagaacataatttgcaggttatgctcgtcgagccaaccgccgagcgggccgttagagccgtagaacagcaaatacaccagaccggcaaccaccgggcttacggcaaacggaatgtccagtagcgtcagcagtaactggcgtccagggaagttaaagcgcgtcaccagccaggccagcagaatgccgaacaccaggtttaccggtacggcaatcagcgcgatcatcaccgtcagccagatggcgtgcagcatgtccggatcggccagattctgtaaaaccggcatcagccccttgctgaatgcctgcacgaagatgtaaatcatcggcaccagcaggatgaacgcgctaaccagcatcccgatgccaatcagaaaccatttgccccagttaatcgggcgcgcgtcataacgcttcaattgggtaacttccgccattaatgacctaccacacgccgaccaaagcgactttgcagagtgttaatactgaacagcagcagcagagatgccgcgaggatcacgctagcaatcgcgctcgctgccgggtaatcaaactcctgtaagcgcacaaaaatcatcaggctcgtcacttccgtcttccacgcgatatttccggcgataaaaatcaccgcgccaaattcaccaagactacgggtaaagctcagcgccacgcccgccaccagcgccggagaaagctccggcagcaccactttgcagaaactctgccagcgcgttgcaccaagcgtttccgccgcttcttcatattccgggcctaactcttccagcaccggctgcacggtacgcaccacaaacggaatgctggtaaaggccatagccaccgcaatccccagccatgtataggtgactttgatatcaaacttcgccagccattcaccgtaaaaaccgtttacggaaaagaggctggccagcgttaaaccggcgacagccgttggcagcgcaaagggtaaatccatcagcgcatcaagcagcgtgcggcctgggaagcgatagcgggttaggatccacgccatcagcagaccgaaaacgccgttaaaaatgcttgccacaaacgcgctcagcagcgttactttgtaggccgcgaccacctgcgggttggtgatcacctcccagtactgcgcccagctcatctgggccagttgcatcaccagcgcggagagcggcagcagcaaaatcaggcacacaaacagcagactggtgccgaggcttaaggtaaagcccggcagcacgcgtctggaggagacagcaaacatcagttacgccccgccgctaacagcttgtctaactcgccgccgctggtgaagtgggttttcatcacttccggccaggagccaaatttgtcttccacgcggaacagctcggtctgcgggaatttgtctttcagtttgtccatcacctccgggttattcacgcggtagtaatagtcggtgatgatggtttgcgcctgcgggctatagagccagttcagataggctttggcggctttttccgtaccgttggcctgcacgtttttatcaacccacgccaccgggaattccgccagaatgttggttttcggaatcaccacttcaaagccctgcgcttcatactgtttacggatgttgttcacttcgctttcgaagctaatcagcacatcgcccaggccgcgctcggcaaaagtggtggtcgcgccacgaccgccagtatcgaacacttcaacgtttttcaggaactgggtcataaactgttcggttttgcctttgtcaccaccgtcagctttatccgctgcgccccatgccgccagataggtataacgcgcgttaccgctcgttttcgggttcgggaaaatcagcttcacgtcggagcgcaccaggtcgttccaatcgtggatattcttcgggttacccttacgcaccaggaagcccatggtggagtagaacgggctgctattattcggcaggcggctctgccagtcggccgggatcagcttgcctttatcgtgcaggatttgtacgtcggtcacctggttataagtgacaacgtcggcttttaagccctgtaaaatcgccagcgcctgtttactactcccggcatgagattgttttatcgtcagtttgtcgccgccgttatcttttgcccattgttgctcaaacggcggattcagggcggcaaacagctcgcgggagacgtcataagaactgttcagcagttccgttgcctgtacatggcccgccagcagcagagaagcgaccagcgcgagactgttctttttcagtaagttaacggccattgcgcacccttataaatttaatgactttctaatagccatcatatttataacggacgtgaaaggagtaacggttttatataccgtttggtgatttggaagttgaaaagggaataagaacttggttcaacaggcgtaattgttgcagtcagtttggacacgaacagcgcggagaaaccggagcgtacacatagtacgtgaggatttcgagcactgcccggggccaaaatgacaaataaaatagcctggtgaacttagttcaagacgaaatcctccccacaaatgcagggaggaaacagaggtgaatcagataccgacgctaaccgtctccggcagtgtgctgccgccatcaatcacattctgtgtaccggttaaatagctggattcatcgcttgcgaggaaggccgccagttcgccgacttccagcggatcggcgaggcgacgcatcgggattgctttcgccatttcagtcagcacgctctctggatcttccgggttgctctggcgggcaatgctttccgccattggtgtgcgcacgtatcccgggcaaatggcgttaacgcgaataccagactgcgcgtactccaccgccaggctttttgtcaggccaacaatcgccgctttcgttaaggcgtacgccgtttcgccaggatcggccaccatatcaccagtgacactagacatcatcacaatgcgaccatctttgcgggcaatcatctccggcagcaccgccttcgtgacgttccatacgcctttaatattgatgtcaatatggaaatcgcgatcgtcatcgctcatatcgaggaaactgcccagacgacaaacgcctgcgttattcaccaggatatcaatgcgcccttctttttccttcgcgcgtttgatagctgcggctacgctcgccgggtcacgcacatcggcgacaaccgccgtacagcgatgaccacgaccacacagttcgtccgccagcttttcgatctcaggggagatatccagcaagattaggttcgcgccatgacgtgcaaaagttctggcaattccttcgccaattccctgcaatgcgcccgtaatcagtgctgtcttgcccgtgagtttacccattttaatgctctccttgttaatacagagcgttacactccattccctctgaaaatacaggataaacaaaatattgctgcggatcagctcactaattcaggaaaatctcaatccagtcgctgctttatgcatcatttcaggcgttgtgttagctcactgctgcgctgaatcattttcaaactctccacatcattgagttgcacaaggccaacaaacagtaaatcggtaacagaattttgcgccgtgcgggtagacatgctgctgctacgccattcggtttctccggaaacggtatcgagggtgaaatgcgccagccgccgcagcggagagtcagtcagagaagtaatggcaatcaccgttgccccctgctttcgtgccgcttctgcgcacaagacaatctcttttttactgccgctgtaagagatagcgatttgtacatcgccttttttcaacgcctgagaaacggtggcttgtacgtgcgtgtcggcttcgcaggccacgcgatagccaattttcatcagtttgaagctcagatcgcgccccaccagcgcgcttccgcccaggcccgttatctggataaacggtgctttactgatgacctcaatgattttttgcagccgcgcgtaatcgagcaacgcgcaggtttgctccagcgccagctctttttcgcgattcagtttgcgcgcgatcacttccaggctatcatcactggtaatgctactgtgcaggtgcagtgccgtggcattcgttttctcccggctggcactgtattcgcctattaacgccatacgcaattcagtaaatccttgcgcgccgagtttttgggcaaatttcactatgctgctctggctaatgccgagctgtttcgccatctgccgactagaaacggattgcagctcactcacgttggcctgcagaaagtcagcgattttttgctcgttttcggtgaattcactccccgcattgcttattttcgtcaggtacaacatcttccactctcctgggctggcagcataaattccgcttaagttcttatgacgctcttcacactctgcgagtgtagactcaatgattcctttaagcctgtcaattcgggatatatgattccatacatctgcaattatttgatcgtaaatagtaaggtcaccaccgatgcaatttgaaaagatgattactgaaggcagcaacaccgccagcgctgaaattgaccgcgtaagcacgctggaaatgtgccggattatcaacgatgaagataaaaccgtaccgcttgccgttgagcgcgtactgccggatatcgccgcggcgatcgatgttatccacgcccaggtaagcggcggcgggcgtctgatttacctcggtgcgggaacatccggtcgtctggggattctggatgccagcgaatgtccgcccacctacggcgtgaaaccgggtctggtggttggtttgattgctggcggcgaatatgccattcagcacgcggtggaaggcgcggaagatagccgggaaggcggtgttaatgatctgaaaaatattaatttaacggcacaggatgtggtggttggcattgctgccagcggtcgcacgccgtatgtgattgccggactggaatacgcacgccagctcggctgccgcacagtgggaatttcctgtaatccggggagcgccgttagtaccaccgctgagtttgccattacaccgattgtaggtgccgaagttgttaccggttctagccggatgaaagcaggtacagcgcagaaactggtgctcaatatgctttccaccgggctgatgattaaatccggcaaagtgttcggcaacctgatggtcgatgtggtcgccaccaacgaaaaactgcatgtgcgacaggtcaatattgttaaaaacgccaccggatgtagcgcagagcaagcggaagcggcgttaattgcttgcgagcgcaactgtaaaacggccattgtgatggtgctgaaaaatctcgatgccgcagaagctaaaaaacgcctggatcaacacggcggctttattcgtcaggttttagacaaggaataacccatggccaaagagatcagcagtgaacttctgaacaccattcttacccgtgtcggcggaccgggaaatatcgccagttgtggtaactgtatgacgcgcctgcgtctgggtgtacatgacagtagtctggttgatcccaatatcaaaacgctggaaggcgtgaagggcgtcattttgaccagcgaccaggtgcaggtcgtttttgggcctggtaaagcgcatcgtgccgcaaaagcgatgagcgagctgctgggagaagcaccggtacaggatgccgcagaaatcgccgcccagaacaaacgtcagttaaaagccaaacaaacctccggcgtgcaacaatttctcgccaaattcgccaccatcttcacgccgctgatccccggttttattgccgccggtctgctgctggggatagcgacgttaattgccacggtgatgcacgttccggcagatgctcagggaacactacccgatgcgctgaattttatgaaggtgttcagcaaaggtttgttcactttcctggtgattctggtgggctataacgccgcccaggcatttggcggcacgggcgtaaatggcgcaattatcgccgcgctctttttgctcggttataaccccgcagcgaccaccggttactacgccggttttcacgatttctttggtctgcccatcgatccgcgcggcaatattatcggcgtgctgattgccgcgtgggcctgcgcccgcattgaaggcatggtgcgccgctttatgccggacgatctcgacatgctgctgaccagcttaatcaccctgctgatcaccgctacgcttgcgtacctgatcattatgccgctgggtggctggttattcgaaggtatgagttggctgtttatgcacctgaacagtaatccgttcggttgtgcggttttagccgggctgttcctgatcgccgtggtatttggcgtgcatcagggctttattcctgtttacctcgcgttaatggacagccagggattcaacagcttatttcccatccttagtatggcaggcgcgggccaggtgggcgcggcgctggcactctactggcgggcgcaaccgcacagtgcgctacgcagtcaggtacgcggggcgattattcccggcctgctgggcgttggtgaaccgctgatttacggtgtcaccctgccccgcatgaagccgtttgttaccgcctgtttaggcggcgcggcgggcggtttgtttatcggcctgatagcctggtggggtctgccgatgggcttaaacagcgcctttgggccgtctggtctggtagcgctgccgctgatgacttccgcacaaggcatccttccggccatggcggtttatgctggcgggattctggtggcatgggtttgcgggtttattttcaccacgctctttggctgccgtaacgtcaatctggactgatatcatgaaacggacaatgctctatctttctctgctggctgttagttgtagcgtcagcgccgcaaaataccctgttctgacagaaagcagcccagagaaagcagggtttaacgtcgaacggcttaaccagatggatcgctggattagccagcaagttgatgtcggttatcccagcgtaaacctgctgatcattaaagataatcagattgtgtatcgcaaagcctggggagcggcgaaaaagtacgatggcagcgtgttgatggaacagcctgtcaaagccaccaccgggacgctgtatgacctggccagtaacaccaaaatgtacgccacgaacttcgccctgcaaaagctgatgagcgaaggcaaactgcatcctgacgatcggattgcgaaatatattccggggtttgccgatagtccaaatgacaccattaaaggcaaaaacaccctgcggatttctgacctgctgcatcacagcggcggtttcccggcagatccgcaatacccgaataaagcggtcgcgggcgcgttatattcccaggataaaggccagacgctggagatgatcaagcgcacgccgctggaatatcagcccggcagcaaacatatctacagcgatgtcgattatatgctgcttggatttatcgtcgagagcgttaccggtcagccgcttgaccgctatgttgaagagagcatttatcgcccgctcggcctgacacatacggtatttaacccgctgctgaaaggctttaaaccgcaacaaattgccgccacggaattgaacggcaatacccgcgatggcgtgatccatttcccgaatatccgcacctccactctctggggtcaggtgcacgatgaaaaagccttttatagcatgggcggcgtttccgggcacgcaggtttgttttccaataccggcgatattgcggtgttaatgcaaacgatgctgaacggcgggggctatggtgatgtgcagctgttcaatgcggaaacggtgaagatgttcaccaccagctctaaggaagatgccacttttggcctcggctggcgcgtgaatggtaatgccaccatgacgccgacgtttggcacgctggcaagcccgcaaacctacggtcacactggctggaccggaacggtgaccgttatcgatccggtgaatcatatgacgattgtgatgttaagcaacaagccacatagcccggttgccgatccgcaaaagaatcccaatatgttcgaaagcggtcagttgccgattgcaacttatggttgggtagttgatcaggtgtatgcggcgttaaagcagaagtaataaaaaggccagtcagtaatgttactggctggtctgagagtgctgacaaacgcaaaactgcctgatgcgctacgcttatcaggcctacgtggagcccacaatatattgaattagcacgatttcgtaggccggataaggcgttcacgccgcatccggcgtgtacaacgcgcacttggtcaacaatctgaggccagtcagtaatgttactgcctggcctttaatcaatgaatcagaaacgcttacagcgccatcaacttgtccaggctcggtgcgaaataatagccgccggttaccggtttggtgaaacgcaacatcgcatcacgcttaccatcggtatcgccaaacatgctcagcagttgctgctcaatgttatgcagacgcgcgcagtaggcgcagaagtacagaccgtgagtgccactggcagtgccgtacggcaggctctggcgaacaatcttcagccctttgccatcttctttcagatcaacgcgggtgaggtgagaggtttccggacgttcgtcgccgtcgatctcttcgttggcctctttggtgcgcccgatcaccatctcctgatcgtgaacgctcatccggttgagctgcttcaggttgtgttcccaacgctggacaaacacatagctgccgcccgcatccacgccgtctttgataaccgccacttcgcgacgcgtctcttcacccgccgggttttccgtaccgtcaacaaagccgctcaggtcacgctcttcaacccaacggaagccgtggatctcttctttcacttcaatgcagtcaccaaaggcttccatcgccgcctgggcgacagagaagtttacgtcgtgacgcagagaaagaatgtggatcaacacatcgaactgggtcgtcggcgcaaggcctttaccgtagcccggaaaatctttcagctcttctgccccaacgccgccgctcagagcgcgccaggtgttgttaccaaaggcaaccaccgcaccaagatgcgcgtccgggaatttcgcttcaaaagttgccagtttgtcggcaaatgttttactggccgcacgcagggcgtcaacttcccctttcacgttggcttcgatccaaatcgccgcgcggcaatgttctggcaaaatgccactctgaacctgagacattgttcctcctgaaaataataatgccacgcaatccgtggcattgttgagcgctattttacgtgttttttcgcggcggcggtttgttcagacgcaaattaacgccgccagataattttactgactttccagtttttcagggtatcgtcgctaggcattaacccttcaggaccacgccattccccgctgaactggtagctaatatgttgactgccttcggctttacattcgacggcacgattatcatcaccatcagctttttggcaattgccaaatgctttgctgtaaaggtcgctaaacggtgtaccgattttaacaccggtgtcagcaggaatatcgctatccagcacgtcaatgcgactgatcgtgccttgatcgccgttaatcaccatcgccacgttgtcgcccttcatcacttcaaaaaagcgcaccacgttgccgttcgcggttttcattccgctgcgcaggcgataatcgccatcaagcgcatcggcaatggcttgttcttgcagtggtgtggacgccgttaattcacccacgccctgctcgctcactttggtggagctcccaaaccagttccacgggttagcggcagaccagttaacactgctcatcgtggaacagccggtcagcatcaatggcatagcgcataacattaaacgcaggcttttcatgtcacttcctttggttattcaataacgttgcttggagtgcaaattcaccaaaaagtgccgttattcttttacttcataaaaacaagcgcgtaaacgtcgattggtcagcagccagattaacgccacaatatccgccactaccagcgccagaccgataccgctaacggattcaccgttcagccacagccacggttgccagcaaagtaaaaccacctgcgccaacagcaacagaaaatagagtacacgccaggtgcgaggaaacgtagcccgccgaccgctcaacaaaaacgccagcaccgccggaatgccaggaatcagccccagccagaaattatcgtgatcgggataaaacagatttagcagcgcagtaccctgctcgcggctcgcaccggcaatgacaaacagcacccaggttcgcgcctgaagcaatagcacaagccagaagagcaagggtaaacgcaggcgaccgtgcgcatcataatggacaggatgaaactcagtactcttcatcttcaatcaaacgcttacccagactcagcacgtcggcgtgttcatatcccaggcgttcatacattccgagcaccatgtcgttatcttccggcacattgatctgaattttcgggcagccacgagcaatcagctttttctccagccgattaagcaacgcattggcaatcccacgcccacgaaactctggatgcacgccaagataataagcagacccgcgatgcccgtcataaccgcccatcaccgttccgaccacgtcaccgtttacctcagcgaccaaaaacaaactgacgtcatggttcatcttacgctcgatgtccatttccggatcgttccacggacgcagcaagtcgcaacgctcccaaagggtgatgacctcttcgaaatcttcctggcgaaatacgcgtatctccatggtattcgttacctttttgcgggttaaaaggctgattatggcgtgaacggtcgaattagccaatatctgacgaaaatcggttgaaaaagtggcataatggggagttgtcaactattgaaatgaaaagtaaaacaattctcaacagcaaaccgtcgtaacggattacgcgatacgatataacatctggaactttattattacaactcaggccgtatgagcacttttaaaccactaaaaacactcactagccgccgccaggtgctgaaagccggtttggctgccctgacgttgagtggaatgagccaagccatcgccaaagacgaacttttaaaaaccagcaacggacacagcaagccgaaagccaaaaaatctggcggcaaacgtgtcgttgttctcgatccaggtcacggcggaattgataccggagcgatcggacgcaacggtagcaaagaaaaacatgtggtgctggcgattgctaaaaacgtccgttccattttgcgtaatcatgggattgatgcgcgtttaacgcgttctggcgatacgtttatcccactttacgatcgcgttgaaatcgcccataaacatggcgcagatctgtttatgagtattcatgccgatggctttaccaacccgaaagctgccggtgctagcgtatttgccctctctaaccgtggggcaagtagcgcaatggcgaaatacctgtctgaacgcgaaaaccgcgccgatgaagttgccggtaaaaaggcgactgacaaggatcacctattgcaacaagtgctgtttgatctggtgcaaacagataccattaaaaatagtctgacgctcggcagccatattctgaagaagattaagccggtgcataaactgcacagccgcaacaccgaacaagcggcatttgtggtgttgaaaagtccgagcgttcctagcgtgctggtggaaaccagctttatcaccaacccggaagaagaacggctgttaggcacggcggcgtttcgtcagaaaatcgccacagcgattgctgaaggcgtgatcagttatttccactggttcgacaaccagaaagcacatagcaaaaagcgataagttatgaaacccgacgcacaccaggttaaacagtttctgctcaaccttcaggatacgatttgtcagcagctgaccgccgtcgatggcgcagaatttgtcgaagatagttggcagcgcgaagctggcggcggcgggcgtagtcgggtgttgcgtaatggtggtgttttcgaacaggcaggcgtcaactttagccatgtccacggtgaggcgatgcctgcttccgccaccgctcatcgcccggaacttgccgggcgcagtttcgaggcgatgggcgttagtctggtagtgcatccgcataacccgtatgttcccaccagccacgcgaatgtgcggttttttattgccgaaaaaccgggtgccgatcccgtctggtggtttggcggtggcttcgacttaaccccattctatggttttgaagaagatgctattcactggcatcgcaccgcccgtgacctgtgcctgccatttggcgaagacgtttatccccgttacaaaaagtggtgcgacgaatacttctacctcaaacatcgcaacgaacagcgcggtattggcgggctgttctttgatgacctgaacacgccagatttcgaccgctgttttgcctttatgcaggcggtaggcaaaggctacaccgacgcttatttaccaattgtcgagcgacggaaagcgatggcctacggcgagcgcgagcgcaatttccagttatatcgtcgcggtcgttatgtcgagttcaatctggtctgggatcgcggcacgctgtttggcctgcaaactggcgggcgcaccgagtctatcctgatgagtatgccgccactggtacgctgggaatatgattatcagccaaaagatggcagcccagaagcggcgttaagtgagtttattaaggtcagggattgggtgtaactccctcacccccactcccgcatccgctgatgcagcgtcagactcggcttctcggaaaacagctgctggtaatccgtggcaaattgccccagatgccagaatccccactgcatggcggcgtcttttaccgtcatactttggctccacggacttatcagttcgcggcgtacggcgttcaggcgaatgcgtttcagccacgcgttcgggccaatgcctaaaatagcgtgaaacgcgttttgtagcgtgcggcggctgacatgcagttgattacacaaatccagcaccgtcaccggttcggacatgttttccagcacatattcacgggcgcgggaaagcaatcgacggtaactctgatgactgatgctttccgccgtcaccattggttgcgcttcttccagcatggcccccatcgccattagcaaattatcccccagcacttttcgcactgcaggctgatggagattttccggattctcgcaaaacgtcgccagcgcctgttggacaaagccccacagcgcggctttatgctgctctttcacttccagcgcgctctggttacgcaacatatgtaatacccgatccgggttatgcaaaaagttagcctgccgggtgatgacatcttcagaaagcaccacgcccaggatcgtgtaatcatccggcgtgctcagttcaaattcagtgccaccagggcgggtggcgatttccgcgcttcccagacattggctaccgataaatccctgctcaccgcgcgtcgccggaatgccaaaccagaagctgttcggccagaccaggcagctctgacgcagcgccagaccggtgtattcacgaaaaacctgaatatcatcgagtagaatttccgtaaattcaccatgaaacttgcccggatgcagctgatcgtaaatctgctgccaggcggtaatcgttaaagcatgttcatagacatccgttgtctgtcgttgatgaacattatccacttcgaccttcggcgtgagcttcaggttttcgggtaagggttcatgataaagatggtgcaaattggctgtacgggtctttttcatgatgttaatgccgggtgttgtaggacacccggcacctccgacaggttaatggggcttgagacgataacgactactgcgtttacgtaacgtcccggcagaaaagagctgttcgagcgcatttctggctttttccagcggccagccaaagtgggcagccacttctcctgccgtcattccctgacgtacacttgttaacagcgccaacaactcgtcagcagattccgcgacgataactggcgcgtcgggttcccttacgggttgcttcggctggcggttaaagccagtaaccagccactgggtgtcatcgtctggccgaccgatctccttgcggctgatgacacgcccggtacgcatcgcggcagcacaacctgcgtccagcgccgcacgacacgccgccagatcgccttccaccaccagcgttaagcgaccagggtcaagcacttcgtgactgagcagacgaacgttagctgctttgagcatggcatccgctgcatctatcgcggcgaccatgccgtccacttccagcaatcccagtgcattgatcatcggcaacctccgttacgcacgctggattggattacgcgcgatttccagcactgcatcggtaaaggcgttacaggctgctttacacgctgcctggctaccggttaaaaatgctgcgctgtagttggtttcagacggtggcgggacataggtcgccagctgtacgtcggcagacttcagggctgcatcaatgccataggtcgcttccagcggcggtgccaccagatacgccatcggatcgccaagcgtgatcccggcggtactactgagataagaaccggtacggctaactacatgtgccaggaatgccgtatcttgcgcgtcattagcccactggaaagctgcgccattttcaatatgcgcaatcatcgcatccagacctgcacgcacttccgccgggtttggcccaccaagcataatcagcacttcaccggcagtcggactcgggccgtgtgcagcgcccgcatataggctgcggccatacaccacttccaccatcgcctgcttggtcgcttcatcagcggcaatgtaggtgacgtcatcggagtcggcagaaatcagaccgaggctacgaatatgcggcggcaatttcagttcacgcgcaaaatcggcgttaacggaggcaatcacccgcatagcggtgacagacggtcgaatcaaatctaaagctggcatgatgcctccttatcgggtcatgttgatgccggatgctttctgctccagcatacgtttcgccaaatccacaatgacggctgcggcttcaaccggcggcgtgccgccctggtgaatgttagagatacaggtgcgatcggcctcaacggtggtcgccatacgcgggctgtaaacggcgtagcaggagaggctttcactctgacccaaccccggacgttcgcccaccagcaggatcactactttcgcgccgaggatctcaccgatctgatcttcaatcttcacgcgaccataacgaacaaagaatggtgtaccgactttcagcccggcctgtttcaggcccgccatcagcggtggcaggatctcttcgtagttcacggtgatcgcatcagtactcaggccatcagaaataacgacctgtacgtccggattggcaacacactgcgctttcagcgcttcaacagcttctgcacacaggcggcggcccatatccgggcgagtcaggtagagatttttgtcgctaatttcagagcgtacttccagcaagccctgcgctttcacccactcttccggcacttctttcagtacggtatctttgctacgagagtgatcggccaggaaacgcagcagcgcctgcgtacgtggacgcggaccggcacgaccggtacaaacgcgggccacggtgctgcggcgcagttctgttaatacgtctgcgcgatgcggattttcaacaccaatccacgcttttgcttcagcggaacctaaatccagcgcacagctttcgctggtcaccggtgccgcacagttggtggtggcgcactttgcttcactcggcgcgggggccgcttgtcccatactcgccatcacgctgcgtacaatttcttcaatctgtttttgatccatgatatgttatctccgcgtcatcagaagaacagactcggatcgcccgcccgtttggtcaggcgaccgtttgccataatgcccatgctttccagccagcgttcaaactccggactcgggcgcaggttgagtaactgacgcacagtggcggtatcgtggaatgcggtggtctggtagttgagcatgatgtcatcacccagcggcatccccatgatgtagttgcagcctgcggtggcgagcaggatcatcaggttttcgttgaggttctggtcagcgtcagcgtggttggtataacagcagtcacagcccatagagatgccgctcagcttgcccataaagtgatcttctaagccagcacggataatctggcggtcgttgtagagatactccggcccaataaagccgaccacggtgttgacgataaacggatcgtaatgacgcgccagcccgtagttacgtgcttccatcgttacctggtctgcgccgaagttagcgccagcggatagcgcagagccttgtccggtttcgaagtagaggcagttttccccggcgatacggttgaactccgcgcccactgcgcgcgcttcgtcgagcatcgccagctccacgccaaactctttcagccctttttcgctgccacagatactctggaaaatcagcccgcccggtgcgccacgacggatcgcttcgatctgggtggtgacgtgcgccagtacacagccctgagttgggatgttgaatttgtcgatcacgccatagatggtatccaacacgcggcttaagttttccacgtcgtcagtcaccgggttaacgccgatcaccgcatcgcccaccccgaaggaaagcccttcgtagatttgcgcggcgatactttgcacgtcgtcacgggtgtcatttggctgcaaacgggcgctaaaggtgcccggaataccgatggtggtattggcctttttgattaccggcattttcttcgcgccgtagatcaggtccgcgttggagcaaatcttcgctaccgccgcgaccacttcgctggtcagccctttgcgggtaaaggcaatgtcgtccacgctggtttcatcgctcagcacatactcacgcagttcgctgatgctccagtttttaatctggttgtaggccgtttcgttaacatcgtcctgaatcagccgcgtcacgcagtcatcttcataggcaatcaccggattattgcggatgtccgctacggtcatttcgctcaacacctgctttgccgccacgcgctcctgactgcttgccgctgcgacgcccgccagcacatccccgctacgcagttcgttggctttagccagcacctcttttacatccttaaactgatatacattgccgaacaatgtggtctttagtttcataagtcgttccctcaggaaggaaatgcgagacttttcaccgtcaccggcacaacgcttccgccaaaaagaggcgtaccaatgtcgatatagtcccccgcgcggacaatcacttcgtcaatgactgccaacgggagttgttgtagctgtgggcgcaacaacatgcccagagctttaccaaagtcctgcccggccaccaccagcaggggatgcggattcggaaaacgcgcgacgaaatcgaccaacgcgttgatgaccgtcagtaccgcggcgtaacgcacaggcaggctggcgggaagcgccagcacgtacgcgtcagttttgggatcaagatccagctgaatcagcgcctgttgccaggcccccaccagatccgtttcatcaatcgggatcgccaccggcaaattgcgcagcggcagttgtacgccctcaagccagattgtgctgccagagaggctaagggtatgcgcgcccgcgccaatcaccgtggcgcgcacggtttgcgccggaaactgtacgttcatctcacgcaggcgcggatggtcatgcagcgcagttgccagcagcgggccaatatcggcaaaacagaacgggtcggcgggctggtggcgataacattcgcccacgccgccagaaagcgtaatgatttcgggcgtaacacctgcgggcagcaaaccggtttgcatcaatgcctgcgcgagcggactgagcgttccgtcaatcacttcgacaatcagttctgccatccgccgggtcacctgcaccagctgcgcgccggtcaggctacgggcgtcggtgcctgcaccgaagcactcatccacaatcatctgccccggtttatgagcgtaaaccacgcgcccgtggctgtcggtttccagcaggcgaccaccgacgttgaggcaggcagtgccgctgatttttccggcatcgaacagggcgtagttcgcggtgccaccgccgatgtcgatattcagtacccgacacagccgttgttcagaaagggtttgtgccccggctccgtgaccggcgatcacggattcgaggtgcggcccggcgctggcaacgacaaaatcgcccaggctctgagagagcgccatcaccgccgggcgagcattgcgggttttcgcgctttcaccggtgatgatgatggcaccagaatcaacgctttccggctcaatacccgcagcatgatattgctcgagtattaaggttttcagttccgcttcttttaaaccgccctgtttatcgacaggggtaaagaacaccggactttgccagctaatttcgcgtttaatgaattcgtagcgcggcacctggctcaccgccgcacggttaaccagctccagccgggagaaaatcacctgggtggtggtggtgccgatatcgataccgacgctcaatagctggcgagtgttcacgattgtgcctccgcttcggtttaagtcagctttgtgcctccgcttcggttttagtcgcggtcgcgtcttcttttggcaccagcatcatcgccacgccaatcgccgttacgccgccgatcaacttgccgacaatcatcgggaagatcatggcgttcatgttggcagcggcgaagcctaagtggtcgcccagggcgaaagcagcggaaacggcgaaggcgcagttgatgactttgccgcgggtatccatctgcttcatcatgccgaacatcgggatgttgttggcaagcgttgccaccatgccggctgccgcgatgttgttcatattcagtactttaccgacgctcatcagcggtttttcaaaccagcgagtcagcagcagcaccatcggatacgcccctaacagaacgcaggagatagaaccgataacttcaatggcgcgcatcacctcaccgggtttatcgccaggggccataaagataggatccagaccggggatcagttcccagccaagcaggaatttcactaccgcagcggcaagaccgagggtgatcaatgcaacgaggaatttggcgaagatctggaagccgttgatcattttttccgggatgaatttcagccccagcgccaccagaatcgcaacaatgatcaccgggatcatgttcatcaggatcagggcgaaagtgaattccaccggctggccgttgatctgcacaccggagtacatagcaaccagaccaccagcgatacaaccaatcggaatggtcacaatgcccgccagcacgccgagcgccagataacgacggtcagaaggttcgataatgccgagcgccaccggaatggaaaacacaatcgttggccccatcatgctcccgagaattaacccagagtatagccacgcggctacgtcgccgcccgccagctctttggcgaggaagaagccgcccatatcgcacgccagcagtgttccggcgaacatgcttgggttagcgccgagcatttcgtaaaccggaataattaccggcccgagaacgtgagccagtaccggtgccagcgcggtcataccgaccatcgccaggcccagtgcgcccattgccataaagccttcttcgaactgaccgccacttccttcgatacttttaccgaacttaccgaggaaacgagcagaaccgccgaactggctcaggatcctgtctacggcagctatcagcataaagaacatcatgatgtacatgatgatttcgttaattcccatcgcctttactccctgttagttgttatttattggcggatgcggcgtaaacgccttatccgccctacatgtgcaatcccgtaggctggataagacgcggcaagcgtcgcatccggcaattgcaccgcgccactggcggatgcggcgtgaacgccttatccgccctacatgtgcaatcccgtaggctggataagatgcggcaagcgtcgcatccggcatttattgcgccgctgcgtacaggccgacaatctgctccaggctggcggtacgcgggttactgcgcagacaaatatcttccagcgcggcctgcgcccatgcgccgtaatgcgcagatgtcgcaccaacatcgcccagtcgtttaccaatcccaacttccgcaatcagctcacttaccgcgttaatagcgtcacgatcgtcggattttttagttcgcagtgcccgaccaatctgactaaagcgttcacgacaaaccatccggttaaattccatcaccgttggcagcaacatggcgttcgcgagaccgtgcggaatatgcagcgccgcgcccggctgatgcgccatcgcgtggcacaacccaagacccgcactggaaaacgccattcccgccatacaactagccagcaacatgctctcgcgcgcggcaaggtcgtgaccgtagcccaccgctttcggcaggcttttgccaatcatcgcaatggcaccaatcgccagactgtcggtaaacggtgtagcgttcagggcgctgtatgcttcaatggcatgggttaacgcatcaatgccggtcatcgccgtgacatggctcggcacaccttcggtcaatgcggcgtcgaggatcgccacatccggcatcaggctggcatgggctaacacctgcttgcgcccgctcaccgcgtcgataatcaccgttacattggtggtttcagagccggttccggcggtagttggaatggcaatcagcggcaagcgcggttgcagaacgctggtttcactcatctctgccagcgtgctatccgggttcgtcaccagcaacgtcacggctttcgccgcatccagcacgctgccgccgccaaacgcgatcaccccatcacagccactctcacgcaactgcgccacggctgcacacacgtcggtaatgcacggttcgcccaccggacatggccagagcgtcatggcgatacctttaacggtcaggctacgcgtcagcccggcggtcatccctgcctgatgcaaaaagctgtctgccatcacgaacagatgtttcagcccacgcgtttgcgcttgctgtccgcaactgctcacgctgcccggaccgcaaagcgtcaccggtggaacgctaaatgtttttacccgttgcagattcagggtatcgaacgcctgaaagagcgcggtctgcaattcattttgcatatagcccctccgctttctctcgcccactactggcgatcgccagcggggtcataaacaaactgtgctgcggtaaatgcacctgtaacgccgggaattgtttgcgaaacagttccgccacgcccggttgcatacaagagccgcccgccagccataaatcagtaatgccctgcccttcaatatgccgggcgacaatgtccgccattttttcgtacaccggtttcaccgcaggccaaatctcttcaccgtgaccgcgcttgtactgctccgcctcttccaggctaatacggcgatttccggcgagagtcagagagatgtgatgtccgccggtggcttcatccgcgctgtacgtcaccttgccctttttcacgatggcaatgccggtagtgccgccgccgatatccactacaccggcgttgtccagttgcagcagatccgcaactgcggttggctcatccagcacatggctcacttccagtccggcagattccagcacgttgatggaaatacgcgggtccgtacctggaggaaaactagtcgccgcatggctaaaacgacgaccgaattgctgctcgagcgtgtcgagatggcgacgaacaatggtgacagcgccgaagaaatcccagacgatgccgtcgcgaaccacatcggcccagtcgaggcataccgccactggctgaccgtcgcggtcgacaaccatgctcaccacatcgcaggtgcccagatccacccccagccacagcggagattccgtcgcggcgggcgtctggttacacagcgttgccgccgtttgcagacgtggggtgagccattgttcgtcgtgcgccatctgttactccttaaacaatgcgaaacgcatcgactaatacacagcgacgcagacggacaaacgtacgcgcgctggttaccccttcaccggttggcgtggtgatggtcatggtggtccagccttccccgcccagccccagcccggcaatgcacggtccgttcttaacgaaaatgctggtatcaatagcattcgccatctggttcatgttttcgatgttgcggctgtgcattgccgccgtgtggtggcaaccgccttccagtttcaccgctagcgcaatggcatccgccacgttggcgacgcgcacgacgggcaacaccggcatcatcagttcagtcacggcaaacggatgttctgcggtggtttccacaaacagcaggcgcgtttcttgcggaactttaaggccgattgccgccgcgattttgcctgcgtcgcgaccaacccagtcacggctgacggtgccttttccgcgctcgtcgatatttttcagcaacaccggttgcagctgctgcgcctgttctgcggtcagtttcaccgcgtgctggccttccatcagacgcatcagttcatcggctacgctatcaacaacaatcagtaccttttcgtcggcacaaatgatgttgttatcgaaagaagcgcctttgacgatggactgagcggcacgggcgaggtcggcggtttcatccaccactaccggcgggttgccagcgcctgcggcaatcagacgtttattggtgtgtttacgcgccgcttctactaccgcttcgccgccggttaccaccagcaggccgatacccggaaacttgaacaagcgttgcgcggtttcgatatccggatttgccacagtaaccagtaagttttccggcccacctgcggcaacaatcgcctggttgagcagcgtaatcgcccgctgggagacttttttcgccgccggatgcggggcaaaaatgacgctgttgcccgcggcaatcaggctgatggcgttgttaattacggttgccgccgggttagtggaaggcgtcacgctagccaccacgccccagggtgcgttttcaattagggtcaggccgttgtcgccagtcagcacttgcggagagaggcactcaacgcctggtgtgccgcgcgcctgagcgacgttttttgcaaatttatcttcaacgcgccccatgccggtttcactgacggcaagttccgctaaatctctggcgtgtttttcgcctgcttcacgaatggcagcaatggctaactggcgcattgccacgctttttaacccttgctgggcgactttggctgccgcaacggcgtcatccagggacgcgaaaacgcccatctcatgaacggcggcggacggcgtgtcactgctttgcattttcagcagtaccgctttcaccacctgttcaatatcctgttgattcatgatgttctgccttatttgtggaaaattacctgaccgccagacaccacctcatcgacaatgccaatcacgcacagatcgaccggactcgtttcgcttttatgcgcctggcgggcggaactgccactcaccagtaacacccactccccggttcccgcgccaatattgtcgatggcgacggcgcattgcccgtcaggattaccttgtggatcaatcatttccaccatcagcaatttgtcatgcgccagtccgtgatggcgtacggtacaaacaatttgtccagtgacgactgccagtttcatacccgcctccgtggcgtatttcaggtaaaagctccccctaccctccgcagaaggtaaaatgaaaaaggagagagcgtgacgcccgaatcgacgtcacacagggtgattacaggttgctgctatcgcctttcaggccgatcgggaagacttcttccaggtcgccgtgcggacgcgggataacgtgtacagataccagctcgccgatacgctgtgccgctgcggcacctgcatcggtcgcggctttacaggctgcaacatcaccacgaaccatggcagtacacaggccgccgccaatctgcttaacaccaaccagcttgacgcgcgcagctttcaccatcgcgtcagaagcctcaatcagtgcaaccaggccccgggtttcgatcattcctaatgcttccattgtgctttcctctttatcagggtccagaacgggaccgttcattcaaccagtgtttgtaaactgctttcgcggttcacttctgtctgacgcggcacagctgccaccagcgccagctcgataatttcctgcacgctacaaccacgagagagatcgtgcatcggcgcggcaagtccttgtatcagtggcccgacggcacgatatccgccgagtcgttgtgcgattttgtaaccaatatttccggcttccaggctcggaaaaaccatcacattggccttgccctgtagcgggctggcaggcgctttttgcgccgccacttccggcacgaaggcggcgtcaaactgtaactcgccatccaccaccagctttggtgcgcgctcacggacgatttctgtcgcctgctggacgttagcaacacaggggtgacgggcgctaccattgctggaaaagctcagcatcgccacgcgcggctcttctccggtgatggcgcgccaggtttcggcactggcaagcgcgatatccgccagctgcgccgccgtcggctgtggcaccacgctgcaatcggcaaagcccaacgccgggccgctgtactgtggcaacatcaggaaaatggaagagagcgttttacagcctggctgcaagccgataatgcgtaatccggcacgcagcacatttgccgtggaagagaggttgcccgcgatacagacatccgctttaccggcgctgaccattgctgcggcgaacatcagagggtcggtaagtttttccagcgcatccggcggcgttttttcgcccgcgcgggccagccagcgatgagcaaattcttcccgcattgcgaggttgccatgcggatcaatcacctgtagcccgtccatcgccacgccgtgactgagcgcaaactgacgaagttcaaacggattggcgaccagaatgggcgttgccagaccttgttgatgtaaatattgcgcggctttcagcacacgttggtctaacgcatccggaaaaaccactctggcgggcgctcgcaacgccagttcacgacaacgttcaataatcattgcgtttcccccagtcgttgttggatctgcttcaccgttagcggctgcttcgttacgctcaggatcatcatcacgtagaccgtgctgctaaggcggttcagcgcctgcaaaatgtccgggcgtaatacttcaaagctgcgggtgataaagacctgcgccgctacggtttcggtttcccgcactttggtgcgtagcagattgagcaacgcagcatcgcgcccgtggctggcttccggcaccagatgatcgtggtcgagatagcgcagcggctgatgagaaagccgatgcagatcttcgtcagaaagcccgacaatcgcctggcagcccagcggttcccccagcgcatcggcgcgcataatgttgccaagacggctacggatatccgccagccacggctgccacggttccgccagttcaatttgcagccacactgccagcgcaatggtgctgtcgagaaccgcgcgaaaacccagacgcggatcgcttttggcgaccattttttccgcgctcaggtgagtcagcgtatccggcttttttgccaccggctggcgacacagttcgcagcacgcctgcggatgttcatcgctactggtcagcccatgaacgggctgcggctgctgctgttcatcgtcaacaaacaggcggccctgctcgtcaataaacttgatgcgcagatggcggctttccagcaactcccgggcagagggcgtcaggcgactgtccgcagggagatggatctctgcgccttcgctgagcgtatggttcgctcttagccatgcttcggtgatgaaatctttcatagggattgccagttagccggccaggcgacatacaggaatttcacgctggatgtcgtaccaaattcgatgctggagcctttcgggataaacatcacgtcgcctgctttggcgatcatggtttggccttcgtggcgaacatgcagctccccttccagcaccatgtcgatttcgtcgtagttcagggtccacgggaagaatgcgttctcccactgcataaaaccggcggccatgctgctgccgtcgtctccggtcacaagatcagtcaagcccacgcaatgcggctctgcgccgtcgaaacgaccaaacttgacgctactgccatcaatcactttgatgccgcctttgccggtcacgcttttgaagctcggctgcattgcgccctgctccaggctctgtttttccttcatcactttttccatcagctgtgcgaccaggctttcggtaaactggccttccggcagctgggcaatgatggtttcgcggatgcgctggctttcggttttgtcggctggcacgctggcgggcacggacgccgttaccgggatgctttcatcacattcggtgatggtaaaacccagtagatccgccacttcacgggcttccggggtaataatgctggcgcgcagaaccacggacattgcctgttcgccgcgcgcgtgtgcttcacgaatatcattcgctgtgatgagttttttcacctgcttcctcctgtttggtgagagatgccagataatccaccagttgctgcacgctttgcgggtcgtggctgtttagctcgaacatcggctcttcgaaacccgtctcaagcaataactttcgcgttgcggcgacgtcagcatctggcatgtccgttttactgatgacggcgatttgccgtttgctgacgccaatatccagcaacccggcaggcaaccgactttccgggtcatttgcgccatggacatagatcagcatgtctacatcctgtagcgtggtaattaaggcgtgataccagcggggatggttaaaatattcacccggcgtatcaatatcgcccttatcattaaattccacggcctgtgtttttctggcgagggtataattcccctgcaacgcattaaataacgttgtttttcctgccccgacgctacccacaaacgcaattcgtttcatgaatgcctcgtattaacttttggtcatttcacaaagcgtataatttaataagcgacctaaaccgctgacggtttgacttaacgcttcttctactgcgcccacgctgccataaatcaccaatgcaccgctgaatcggtcgagaaaaccgatatgcacatcagcggctttcagcgctaaatcaccggcgatcatcgccgtttcgccgggagttagcgtcataatgccaattgcgcccgcatccggaacgccgattttcttcgccagttcctcaccgggatgcgcgatgagatgcgccagtgtgacctgtttgccgggcacaaattcctgaatgatgcgttctttatccatgagtcgccgcctgtgaaaaactttcgtgtatcgtgacaatttttcgtcagagtaaataacaaaattcggcaagcgcgtttaaaaggtgaggtagatcactaagaatggagagatattcgctgtggtgcataaactttcatatgcaacgcatgaatataaataaaataatatcgagatattatatagactgcttttttttattattcgcaaactcagtaataagctttactaatatattgcagctaaactgcttaccctgaatattcagggtaagcgtgagagttaaaaaaaattacagcggttgggtttgcgcttctaccacggccagcgccaccatgttgacgatacgacgcacgcttgcgatcggcgttaacacgtgaaccggtttcgccacacccatcagcaccgggccgacagtcacaccttcgctgctggaaacacgcagtaagttgtaactaatgcgggcagcttccatgttcggcatcaccagaatattggcggaacctttcaaagagctgtccggcatacggtcgttgcgaatcgcttccaccagcgctgcatcgccgtgcatttcaccatcaatcatcagttctggtgcacgttccctgaccagttccagcgcctgacgcattttgctgctgctcgggcagtcagaagaaccaaagttggagtggctcaacaaagcaacgcgcggctcaataccaaaacgacggacagtttctgccgccatcaaggtgatctccgccagctcttctgcatccggttcatcattaacatatgtatcggcaataaaggtgttaccactcggcagcagcagcgcgttcatggcacctgcggtgtgaacgccatcgcgataaccaaagacatttttcaccacgctaaaatgttcatgataatcacccaccgtaccgcaaatcattgcatcggcttccccacgctgaaccatgatcgcgccgatcactgtcgggttactgatcagcgcccgctgcgcctgttcctgagtgacgccgcgacgcttcatgatctggaagtattcggtccagtactctttaaagcgcggatcggattcgttattgacgatctcaaaatcaacgcccgctttgatctgcaagcccagtttctgaatgcgcatttcgatcacgttcggacgaccgataaggatcggtttcgccagtcccagcgttaccagttcctgagtggcatgcagaacgcgcgcctcttccccttccggcagaacaacgcgcttcggcgctttgcgagcctgggagaaaatcggcttcataaacaggttggttttgtaaacgaactcagtcagcttgtcgatgtagacgtcgaaatcagcaatcggacgagtcgccacgccgctctccatcgcggctttagcgaccgcaggagcgatcttaacgatcaagcgcggatcaaacggctttggaatgatgtattccggaccaaagctcagatcctgatcgccatacgcactagccaccacttcgctctgttccgcatgggcgagttctgcaatcgcacgtaccgccgccagtttcatctcttcgttgatggcggttgcgccaacgtccagcgcgccacggaagatgaacgggaagcacaggacgttgttcacctggttcggatagtcagaacgaccggtgcaaatgatggcatccggacgcacttctttcgccagcggcggcagaatttccggttccgggttcgccagcgccaggatcattggcgcacgagccattttcttcaccatttcctgggtcagcactttcgggccggaacagcccaggaaaatatccgcgccttcaatcacatcatcgagggtacgtttgccgtcatccaccaccgcatatgcggctttggtttccgccatgtttggctcacggccctgatagataacgcctttactatcgcaaaccacgatgttatgtttttgcagacccagcgctaccagcaggttcatacaggcgattgctgcggcacccgcgccggaaaccaccatccgcacgtcggagatgtttttctccaccacgcgcaagccgttgaggatggcggcagtgctgataattgccgtgccgtgctgatcgtcgtggaataccggaatattcatccgctcgcgcagtttctgttcaatatagaaacattctggcgctttaatgtcttcgaggttgatgccgccgaaggttggttcgagcgcggcgacaacttcaataaatttgtccgggtcgagttcgtcaacttcaatgtcaaatacatcaatcccggcgaatttcttaaacagaacgcccttgccttccatcaccggtttgcctgccagcgcgccaatgttgcctaaccccagcaccgccgtaccgttagagatcaccgccaccaggttacctcgggcggtatatttgtaggcttttaacgggtctttttcgatttcaagacaaggtgcggcaacgcctggactgtaggccagcgccagatcgcgctgtgttgccagaggcttggttggagaaacctggattttccctggaactggaaattcatggaaatcaagtgcactttgttttaactggtcatccatttggttgttcctttcacgtaacgttcacaaataaagtgtgtgggcaacagcccctgcccacaacgtggcgcacattattaccctgccggagtctacagactttgagcaagtccaaactctcaccattaatataatgttttggtaataatcctataacactgatgttacctgcttaatccagcaataccatgcctgtctgctatgcttttttgatgcgtttagcgaaatttctcagaagtgtgaattaacgcactcatctaacactttacttttcaaggagtatttcctatgaacgagttagacggcatcaaacagttcaccactgtcgtggcagacagcggcgatattgagtccattcgccattatcatccccaggatgccaccaccaatcctagcctgttactcaaagctgccggattaagtcaatatgagcatttaatagacgatgctatcgcctggggtaaaaaaaatggcaagacccaggaacaacaggtggtcgcagcgtgtgacaaactggcggtcaatttcggtgctgaaatcctcaaaatcgtacccggtcgcgtgagtacagaagttgatgcacgcctctcttttgataaagaaaagagtattgagaaggcgcgccatctggtggacttgtatcagcaacaaggcgttgagaaaagtcgcattctgatcaagctggctagcacctgggaaggaattcgcgcggcagaagagctggaaaaagaaggtattaactgcaacctgacgctgctgttttcttttgcacaggcacgggcctgtgcggaagcaggcgtttttctgattagcccgtttgtcgggcgtatttatgactggtatcaggcacgcaagccgatggacccgtatgtggtggaagaagatccgggcgttaaaagcgtgcgcaatatctacgactactataagcaacaccactatgaaaccattgtgatgggcgcgagcttccgtcgcaccgaacaaatcctcgccttaaccggctgcgatcgactgactatcgcaccgaatttactgaaggagctgcaggaaaaagttagcccagtggtacgtaaattaatcccaccttctcagacgttcccacgcccagctcccatgagcgaagcggagttccgttgggagcacaatcaggatgcgatggcggtagaaaaactgtctgaaggcattcgtctgttcgccgttgatcaacgcaaactggaagatcttcttgccgccaaactataaaccagccacggagtgttatatgtcccgaaaagaccttgccaatgcgattcgcgcactcagtatggatgcggtacaaaaagccaactctggtcatcccggcgcgccgatgggcatggctgatattgccgaagtgctgtggaacgattttcttaaacataaccctaccgacccaacctggtatgatcgcgaccgctttattctttccaacggtcacgcgagcatgctgctctacagtttgctacatctgaccggttacgacctgccgctggaagaactgaagaacttccgtcagttgcatagcaaaaccccaggccacccggagattggctatacgccaggcgttgaaaccaccaccggcccgcttggacaaggtttggcgaacgccgtcgggctggcgatagcagagcgtacactggcggcgcagtttaaccagccagaccatgagatcgtcgatcacttcacctatgtgtttatgggcgacggctgcctgatggaaggtatttcccacgaagtctgtagcctggcaggcacgctgggactgggcaagctgattggtttttacgatcacaacggtatttccatcgacggtgaaacagaaggctggtttaccgacgatacggcaaaacgttttgaagcctatcactggcatgtgatccatgaaatcgacggtcacgatccgcaggcggtgaaggaagcgatccttgaagcgcaaagcgtgaaagataagccgagcctgattatctgccgtacggtgattggctttggtagcccgaataaagcaggtaaggaagaggcgcacggcgcaccactgggggaagaagaagtggcgctggcacggcaaaaactgggctggcaccatccgccatttgagatccctaaagagatttatcacgcctgggatgcccgtgaaaaaggcgaaaaagcgcagcagagctggaatgagaagtttgccgcctataaaaaggctcatccgcaactggcagaagagtttacccgacggatgagcggtggtttaccgaaggactgggagaaaacgactcagaaatatatcaatgagttacaggcaaatccggcgaaaatcgctacccgtaaggctagccaaaatacgcttaacgcttacgggccgatgctgcctgagttgctcggcggtagcgcggatctggctcccagcaacctgaccatctggaaaggttctgttagcctgaaggaagatccagcgggcaactacattcactacggggtgcgtgaatttggcatgaccgctatcgccaacggcatcgcgcaccacggcggctttgtgccgtataccgcgacgttcctgatgtttgttgaatacgcccgtaacgccgcgcggatggcggcactgatgaaagcgcggcagattatggtttatacccacgacagtattggcctgggcgaagatggtccgacgcaccaggctgttgagcaactggccagcctgcgcttaacgccaaatttcagcacctggcgaccgtgcgatcaggtggaagcggcggtgggctggaagctggcggttgagcgccacaacggaccgacggcactgatcctcagtaggcagaatctggcccaggtggaacgtacgccggatcaggttaaagagattgctcgtggcggttatgtgctgaaagacagcggcggtaagccagatattattctgattgccaccggtagtgagatggaaattaccctgcaagcggcagagaaattagcaggagaaggtcgcaatgtacgcgtagtttccctgcccagcaccgatattttcgacgcccaggatgaggaatatcgggagagcgtgttgccttctaacgttgcggctcgcgtggcggtggaagcaggtattgccgattactggtacaagtatgttggtctgaaaggggcaattgtcgggatgacgggttacggggaatctgctccggcggataagctgttcccgttctttggctttaccgccgagaatattgtggcaaaagcgcataaggtgctgggagtgaaaggtgcctgatggtgattgccggatgctgattgccggatgcgacgctgacgcgtcttatccggcctacagcgtcttatccggcctacatgtcccgccattttgtttaacgggtgatccacaacgtgggccaggcgtctggcccatgccagttatcgcaggtgggttctgcggcgtaacgcaccaggcgaaaacgctgaccgtcaaagcgccagcgcgcctgaatgccacaatcgcttaatccgcgccctttcgctaaggtcaccagttcacggcttttctcatcaaatgttgcgttcatcagttccagttcattcgtctcctgaccgttgttgaacggcaaacgcaaccgaaccgggcggctagctagtggctttttacggctcacaatccatgccaaatcaatggtgttataggcccctgcctcacagctaatcatcatcagcgctttatcatcagtcagcgcagtgacattcacctcacgacgcaatggatcaaggctgcagcgcagaccattcatccgccagtttccataatccagcaaatcgttgcgttcttcgagactgagtggcgtcggcgttgggttaaccaccgcgacctctttcagcgcaggcgcgggcggtacgctgagcggcggttcgtcccctttcttgatccacgcggtttcactgccaacgcgcttttgctgagcatcaataaacaacaacgctgcttttaagccactcagagaaatggtctgatcgccatcgcgtaaggtgattgccttcccttcctgaatcatctgcaaaaacgcggtgatggttgccgtatcatcggttactaataaccatggactaatccgccacttgtcaccacttaacgccaacggctcgccatctaacagcagccgtggcgctatctccccttcactcgcctccgggctcttcaatccgccgcgctcaatacgtaaaacggcatcggtatgcgccccggcgctgcggctcagggtcatcaccagtccattatgatcgcccgtattacgcgccacgcagaaattttggttattacaggtgacctgccagtcggaaaacgcccgttgcgctggtgccgcccacaccaaagacgtcggcaacaaagcgaaaaaaaagagaaggaaaatgcgatagcgcatggacggtacgaccccagaagttcaaacaaacagcacaagtcgtatcttcgttgcgcaggtagcgcggctcaatcggatttgtcggattgagccaataataaacaacgaaatattattgttatttttcagtccattaaatgactcgtttgcaaatagttaagcaataacaccgtcttaccgtcacgtatctcgccggttttgatcatctccagcgcctggctgaacggcagctcgagcacttcaatatcttcatcttcgacaccgccaccggcgttagcgcgctgattgtcactgtattcggcgataaaaaagtggattagctcagtcacaccgcctgggctcatatacagttcaaataatttgcgcacttcacccacttcatagcccgtctcttcaatcgcttctttgcgaatacacacttccggttcgtcgttatccagcagcccggcgcagctttcaatcagctgcccgctttcattgccattaacccaggtagcgacacggaactgacgaatcagaaccacggtctttttcttcgtgttgtacaggaggatcgtcgcaccattgccgcgatcgtacacttcacgtttatggcggataacttcgccgtctttgcgcgtgagatcgtaagtaatgttgtgcagggtgaaatagttatcggagagaattttgtctttaatgagggtgatttgttgcgtcataccgactccacagcgcgaaatgaacaattatcttacgctgtgaagtcgggtttgtctgcgcaggctatcagtgagatttgacactttttacccccagccagtcaataatcccctgtgccgcatgacgtccttctgccattgcggtaaccaccagatccgcaccacgcacggcgtcaccaccagcgaagattttcggattggtggtctggtaacggtactggctttccacatccgcgatgatgcggccccatttgtctaccgttacaccgtggctctccagccacggcatcccgtgcggattgaagccaaacgccataatcaccgcgtcggctggcatgacaaattcactgccttccaccggcactggacgccgacgcccctgggcatccggctctccaagacgcgtgcgcaggaaacgaatcccgcagacgtgaccttgttcattcagctcaagcgccaccggctggacgttaaattcgaagttggccccctcttcgcgggcgttcttcacttctttcttgctgcctggcatgttagcttcatcacgacgataagcgcaggtgacgttactcgcgccgtggcgcagtgcggtacgcacacagtccatcgcggtgtcgccgccgcccagtaccacgacgttaagtccggcggtattgataaacggctcttccggtagctcttcgagccccatcacctgtttagtgttggcaatgaggaacggcagcgcgtcataaacgcccggcgcatcttcattgggtaaacccgctttcatggaacggtaagtgcctacgccaacgaagaccgcgtcgtattgttccaaaaggctatccaaagagacatctttacccacttcacaattgagttcgaagtgaatccccatcgcgctgaagatttcccgacggcgtgccagcagggatttatccagtttgaaagaaggaatgccgaaagtgagcaagccaccgatttctggatggcgatcgtacaccgtcacccccacgccattgcgggtcagaacatccgcacaggccagccctgccggacctgcaccgataatcgccacccgcttgtccactttggtgacatggcttaagtcaggacgccaacctttcgccaacgcctgatcactaatgtagcgttcaatgttgccgatagttaccgcgccgtgctcatcgcgaatagtacaggcaccttcacacaaacggtcttgcggacaaacgcgtccggtaatttccggcagggtgttggtctggtgagaaagctcgacggcggcgtcgatgtttccggctttcaccagttcaatccactgcggtatatggttatgcagcgggcaggtccattcacaaacgctgtgctcgccgcacttaaggcagcggctggcttcccgttgtgcctggtcggcgcgaaatggcagataaatttcatcaaaaccggttttgcgcgcttcaatcgccagtttatccgactcgccacgcgcgggcgttgcctgcatttgttcgactttactcattaccggcatttcttgcgccgcggtactggcatgccacggttgatgttcctgacgcgcggtgcgcaagcggcgggatttcgccatgccggagagtgcgacgtcagtgaccagttgcagcgcgtccgccgggcaattctcaacacaggcaggaccgttttcgcgccccgcacaaaggtcgcatttatgcgccgtggcttttacttttcctgccgcgacgggtgtcaggacgatttgcatcgtaccaaaaggacaggccaccacgcaggatttacagccaatacacttttgctgattgacctgaatgctgtcatcaacgtggctgattgcgccattagggcagctacgggcgcagggcgcatcttcacaatggtgacaggtcactgcactacgttgctgttgatgtttgataaccgtaattcggggatgaaaatggtgttggctcaggacatgttgctcatcattgtgagccatgacacaggcgatttcacaagcatgacaacccagacattgctgactgttggccataataaaacgattcataacgaccttcttttttggttgtaaaaaccttattctttatatgagtgttgttattacccgacttacaggggaatcggcaatgttcatgtgcccagaataagtaactatttcgctataaactgtggcagatcaaataatcccatcactgactaaattgcgtttcagcgaactggaacattaatgattttttgtggagaagacgcgtgtgattgttaaacgacccgtcagcgccagtctggcccgggcctttttttacattgtgctgctgagcattctttccacgggtatcgctctgctaactctggcgagcagtttgcgcgacgctgaggctatcaatattgccggaagcctgcgtatgcagagttaccgcctgggctacgacttgcaaagtggcagtccacaactcaatgcacatcgccagttatttcagcaggcactgcatagtccggtattaaccaacctcaacgtctggtatgtgccagaagcagtaaaaactcgctatgcgcatctgaatgccaactggctggagatgaataatcggctcagcaagggcgatttgccgtggtatcaggccaatattaataattatgttaatcagatagacctgttcgtactggctttacagcactacgctgaacgcaaaatgctgctggtggtggcgatttccctggctggcggcatcggtattttcacgctggtcttttttactttgcgccgcatacgccatcaggtggttgccccgctgaatcagctggttaccgccagtcagcgtattgaacacgggcagttcgacagcccgccgctggataccaacctgccgaatgagcttggtctgcttgcaaaaacctttaaccagatgagcagcgagctgcataaattgtaccgtagcctggaagcgagtgtagaagaaaagacccgcgatctccacgaggccaagcgtcgtctggaggtgttgtatcagtgtagccaggcgctgaacactagccagattgatgtgcattgtttccgccatattttgcagattgttcgcgacaatgaagcggctgaatatctggagttaaatgtcggtgaaaactggcggattagcgaagggcaaccaaacccggaattgccgatgcagattttaccggtgacaatgcaagagacggtttacggcgaactgcactggcaaaatagtcacgttagtagtagtgaaccgctgcttaacagcgttagcagcatgctgggacgcggtttgtactttaatcaggcgcagaagcattttcagcaattattgttgatggaagaacgtgcgaccatcgcccgcgaattgcacgacagcctggctcaggtactttcttacttacgtatccagttgacgttactgaagcgtagcataccggaagataacgccaccgcacaaagtatcatggccgatttttcccaggcgttgaatgatgcttatcggcagttacgcgagctgttgactactttccgcctgacgctgcagcaggcggatctcccctccgcattgagggaaatgctggatacgttacaaaatcaaaccagcgccaaactgaccctcgactgccgtctgccaaccctggcactggatgcgcaaatgcaggtgcatttgttgcaaattattcgcgaagcggtgctgaatgcgatgaagcacgccaacgccagcgaaatcgccgtcagttgcgtcaccgcgccggacggcaatcacacggtttatatccgtgataacgggattggtatcggtgaaccgaaagaacccgaaggtcattatggtctgaatatcatgcgcgaacgcgcggaacggctaggtgggacgctgacttttagtcaaccttccggcggcggcacgttagtgagtattagctttcgctctgcggagggtgaggaaagtcagttaatgtaatgcctcctactgaccaaagaatacttgcacttaaggttcagtataaaagggcatgataatttacattaactcctttttttctccacgattggctcgtaccttgccgctacagtgaagcaagtcaagcctacaacgatacgcagaaacacgaggtcctcttttaatggcgaatttctttattgatcgccccatttttgcctgggtgctggcaatcctgttgtgtctgacaggtaccctggcgatttttagtttgcccgttgaacaataccccgatctcgcgccaccgaatgtgcgagtgaccgctaactatcccggcgcaagcgcccagacgctggaaaacaccgtgacccaggttatcgagcaaaatatgaccggcctcgataatctcatgtatatgagttctcagagcagtggcaccggtcaggcatctgtcactttaagttttaaagcaggcaccgatccggacgaagccgtgcagcaagtacaaaaccagctgcaaagtgccatgcgaaagttaccgcaggcggtgcaaaatcagggcgtgacggtgcgtaaaaccggcgataccaacattctgaccattgccttcgtctctaccgatggtagcatggataaacaggatattgctgattatgttgccagtaatattcaggacccgttaagccgcgtgaatggcgtcggggatatcgatgcctatggtagccaatattccatgcgtatctggctggacccggcgaaactcaacagtttccagatgacggctaaagatgtcactgatgccattgagagtcagaacgcgcagattgcggttgggcaacttggtggtacaccttccgtcgataagcaggcgctcaacgccaccattaacgcccagagtctgctgcaaacaccagaacagttccgcgatatcaccttgcgggtcaatcaggacggcagtgaggtaaggctgggcgatgtcgccaccgtcgaaatgggggcggagaaatacgattatcttagccgcttcaatggtaagccagcctccgggctgggggtaaaactggcctccggcgctaacgaaatggcgacagcggagctggtgctcaatcgtctcgacgagctggcgcagtatttcccgcatggactggaatacaaggtggcgtatgaaaccaccagctttgttaaagcctccattgaagacgtggtgaaaacgctgctggaagctatcgctctggttttcctcgttatgtatctgttcctgcaaaacttccgcgccacgctgatacccactatcgccgtgccggtggtgttgatgggaaccttctccgtactttacgccttcggttacagcgtcaacaccttaaccatgttcgcgatggtgctggcgatcggtctgctggtggatgacgccatcgtggtggtggaaaacgtcgaacgtattatgagtgaggaaggactcactcctcgcgaagccacacgtaaaagcatggggcagatccagggggcactggtcgggattgcgatggttcttagcgcggtatttgtaccaatggccttcttcggcggcaccaccggtgccatctatcgccagttctctattaccattgttgcggcgatggtgctgagtgtactggtagcgatgatcctcactccggctctgtgtgccacactacttaagccactgaaaaaaggtgagcatcatgggcaaaaaggcttttttgcctggtttaaccagatgtttaaccgcaacgccgaacgctacgaaaaaggggtggcgaaaattctccaccgtagcctgcgctggattgtgatttatgtcctgctgcttggcggcatggtgttcctgttcctgcgtttgccgacgagcttcttaccgctggaagaccgtggcatgtttactaccagcgtacagttgcccagcggtagtacgcaacaacagaccctgaaagtcgttgagcaaatcgagaaatactacttcacccatgaaaaagacaacatcatgagcgtgtttgccaccgttggttctggccctgggggtaacgggcaaaacgtggcgcgaatgtttatccgcctgaaagactggagcgaacgcgacagtaagaccggcaccagctttgccattatcgagcgtgcaacgaaggcgtttaaccaaattaaagaagctcgcgttatcgccagcagcccgccagcaattagcggtcttggtagttctgcaggttttgatatggagttgcaggaccacgctggagcgggtcacgatgcgctgatggcagcacgtaatcagttgctggcgctggcggcggaaaacccggagctaacccgtgtgcgccataacggcctcgacgacagtccgcagttgcagattgatatcgaccagcgtaaagctcaggcgctgggcgttgctatcgacgatattaacgacacactgcaaaccgcctggggtagcagctatgtgaatgactttatggatcgcggtcgcgtgaagaaagtctatgtgcaggcagctgcgccgtatcgcatgctgccagatgacatcaatctctggtatgtccgaaataaagatggcggcatggtgcccttctctgctttcgcgaccagtcgctgggaaacaggcagcccgcgtctggaacgctataacggttattctgcggttgagattgttggggaagccgcaccgggggtcagtaccggtacggcgatggatattatggaaagcttagtgaagcagctgccaaacggctttggtctggagtggacggcgatgagctatcaggagcggctttccggcgcgcaggctccggcgctgtacgccatttccttgctggtggtattcctgtgtctggctgcgttgtatgaaagctggagcgtgccgttcagcgtaatgctggtcgtgccgctgggggtaatcggcgcgctgctggcaacctggatgcgcgggctggaaaacgacgtttacttccaggtgggcctgttaacggtcattggtttaagcgcgaaaaacgccatcctgatcgtcgagtttgctaacgagatgaaccaaaaaggccacgacctgtttgaagcgacgctccacgcctgccgtcagcgtttacgcccgattctgatgaccagcctggcatttatcttcggcgtattgccaatggcaaccagcacgggtgccggttccggtggtcagcatgcggtgggtactggcgtaatgggcgggatgattagcgccactattctggctatttacttcgtgccgctgttctttgtgctggtgcgccgccgcttcccgctgaagccgcgcccggaataagcaataaaaaaggcgacatgccaatgtgtcgcctttttcaactttccgattaagaacctgctcagcgggttcttgctgtttgtactttgtctcaggaattacttacgaagcataacttcgataaagtctttccagttccccagttcacgttcaatcataacaacctctcttataattatgggtattctacggaaacaatataccgtggtgaagctaatttactcgattgctgcgatgactacctccgggggacaaatcttatgtaaatactatggtcctgcggtgatgatttgtatgtgatacacagcaacatttcgagatattcatacggcatctaatactgatttaattctggttaaaatacagacagataacaagatgaatattcttaatgtttacgttaaaaatgtttaatattatttaatagttgttaatttgaatacttcgataatgttatatttcctgataatcatttgcaggcaaaatgttttcacccttaaatgagtatttattctcataaatcgaaaaaggattcattatggttacactttacggtatcaaaaattgtgacaccattaaaaaggctcgccgttggctggaagccaataacatcgactatcgttttcatgattaccgcgtcgatgggctggacagcgaattattgaacgattttatcaacgaattaggctgggaagcgttactcaacacccgtggtacaacctggcgtaaactggacgaaaccacccgcaataaaatcaccgatgcggcctctgcggcggcattaatgactgaaatgcctgcaattatcaaacgtccattgctctgcgtgcccggtaagcctatgctgctgggtttcagtgattccagttatcagcaatttttccatgaggtgtaatctatgagctgcccggttattgagctgacacaacagcttattcgccgcccttccctgagtcctgatgatgcaggatgccaggctttgttgattgaacgtttgcaggcgatcggttttaccgttgaacgcatggactttgccgatacgcagaatttttgggcatggcgtgggcagggtgaaacgttagcctttgccgggcataccgacgtggtgccgcctggcgacgccgatcgttggatcaatcccccgtttgaacccaccattcgtgacggcatgttattcgggcgcggtgcggcagatatgaaaggcagcctggcggcgatggtggtggcggcagaacgttttgtcgcacaacatcccaaccatacggggcgactggcatttctgatcacctctgatgaagaagccagtgcccacaacggtacggtaaaagtcgtcgaagcgttaatggcacgtaatgagcgtctcgattactgcctggttggcgaaccgagcagtatcgaagtggtaggtgatgtggtgaaaaatggtcgtcgcggaagtttaacctgcaaccttaccattcatggcgttcaggggcatgttgcctacccacatctggctgacaatccggtacatcgcgcagcacctttccttaatgaattagtggctattgagtgggatcagggcaatgaattcttcccggcgaccagtatgcagattgccaatattcaggcgggaacgggcagtaacaacgttattccgggtgaactgtttgtgcagtttaacttccgcttcagcaccgaactgactgatgagatgatcaaagcgcaggtgcttgccctgcttgaaaaacatcaactgcgctatacggtggattggtggctttccgggcagccatttttgaccgcgcgcggtaaactggtggatgcggtcgttaacgcggttgagcactataatgaaattaaaccgcagctactgaccacaggcggaacgtccgacgggcgctttattgcccgcatgggggcgcaggtggtggaactcgggccggtcaatgccactattcataaaattaatgaatgtgtgaacgctgccgacctgcagctacttgcccgtatgtatcaacgtatcatggaacagctcgtcgcctgatgagtggttctgcaagaggaaataagcatggactggctggctaaatattggtggattctggtgattgtctttttggtaggcgtcctgctgaacgtgattaaagatctcaagcgcgtcgaccataagaaatttctcgccaacaagccggagcttcccccgcatcgtgatttcaacgataagtgggacgatgacgacgactggccgaaaaaggatcaaccgaagaagtaagctgagtgctcaaccgtaggccggataaggcgttaacgccgcatccggcaatggtgaacgatgcctgatgcgacgctcacgcgtcttatcaggccaggtaatctgtcttttacatcatttcaatcacatcatcatcgccaggcttaccgccacttagcgcttcgtcgaaataatgtttcggaatggtataacgcaagtgatccagggcaaattgcatactgcgattgtcgatcgcatggcctaaatcctccacgatatccagcgtcacgtcaccaccggcactgattaacgcttcctgcgccgcaaccgcatgcgccagatcgataaccggatcttcaccgccatgaatcaggtgaattgtcgtggctgtagacgcagtttccggcaggctcgcatagcgtccgttaaaagcaatgacgcgactagcaaggcccggttcggctttaatgctctccagcaccataatcgcgccttgagagaaaccgatgagcgccgtggcgttagcccctactccgctctgtttctgccagtagcgcaccgtttcaataaacgtcggcatgatcgcatccacacgcgcctggcgattatcttccgtaataccctgcacgctaaaccactgacgccccgccggattaccgctcggctccgcgccaccgacactcaccaccagcgcatcaggaaacagcggtgcaaaccagttgcctatttcccccattgccaccgggttatccccgacaccgtggaaaagcagtaacaactgttgcgcaggtttatccgggctttgaacaacaaaatggtcatgtttcatggcgaactccttaactgatgtcattaattttacgccgctgactcacaatgaccatgagataaaattgaaggagtcagtgaaataattgccattgcgttatgcgatcgcgcagacgctcagtgcgaacatcattaagtgcgaacagcgcctgcgcggcctcttcccgctgacggaccagtaacatcttgcggccactaagtttaagtgtggtacataactgcgcatcactggcgtttttctgtaaacgcccacgcagcgccggtaatgccagttcactggtttgtaacagacgcaataagcaacctaagctcgttaatagcggacgatgagcgaaagcaaaaccggccagttcaagccagtcgtcgtcagaaaggacggcatcgtttagtggatcaacaggaagcgtttcgccattccactgcgcgagagcttgcgcatcgcgacgtaaacggtaatgctcacgttcagccagctgtttacccgcatcactcatcggtaacagcgccatcgccgtatagcaaccgctgctggcttcccgatgattacccatccgcaccagcacaaaaccgcagcgttgccagaaacgccataactccccggtgtaaccaaaactcacgctaagatagtcgaggtcttgcgtatattgcaaagcaccagcaataagttgccgccctgtgccttcccgctgacgagccggatgaactgctatccggctgacccgccgtccacgcaatgtcgccgccagtggattgttgccgtgcgccgccaggctctgggccaccagattaccccgcgggcgacgaaaacctgcccataccgcctgactgagttgttgagataatccaccctcatccaccagccacagcgccccggcaatctcgttttcgccagccgcctgtaaaaaatgttgccctggtgcatccatcatccggcgtaaatccagcgggctagtccgatagtgcgcaccagacaagagctgataaacctttaacggcgtttctggatcgctttgccataacgtctgttcaaatgcggaaatgacaatattgccttgtggtgtatgggtgaagttttcatcgtcaaaaaccagtgcctcgctgaccattttttccagcgggcatccctgcgcccagcggatcggctgttgcagttcaaaacggtgtaaatgcggaaagcgagcgcaaaatttcagcaaaaaaccacgtccggtgccttcgtagccctgcaccgtagtggttaacaacgttcgaggaaaacggcttaccagttgatgcaacaatggcgcaggtatggctgcggcttcatcgaccaccagccagtcggcttgctcatcgctggctaacaaggcatccggcgcaataaagcgaaacttctcgcccgcaaattgtgccagtacatccgtactcgcttttgcgggcgcggtgacaatcgctctgcccgcaatacgagaaatgagttgccctgccaacgcgctcttaccgcgcccacgcgcagccgttaccgctgccacgcccggcggcatggtcattagctgctttaagagttgctgttgttctggttgtggtgcgccagtcgcggggtaccagtcagtacggggagtaaaatgcgccaagctgaatggctggttttgccgccagaggatagcctcgttatccgccgtaagtacgcgtttgagatgctggacaaaatgcggcgtcgcaatagggtcagggcaatcactccagcgcaggctgtcggcatcaggttggttttcccactcttcccatacagggagtaacaaaaccagccagcttcccgctttcaacgttccgctaagtgcggcaaaggcagcggcatcaaagccgtggcgggcgtcgaataccgcatgccggaactcgcgcccaagtaaagtttgtagtgcgctgggagaacagtggttttcagcatctggccgcgggctaatccacagccagtcgccaggtaaggcatcacgcaacttaagagtatgctcaaaacaccaaccctcttccccgctcaacaccagcaagcggcggatcccttcacgtttcatttgcgctgttaatgtgtgaagcgcagtcagttcagccatccctgccccggaagttaaatgcttttaccaaaagtattgcattgtgccggatcgccgctgtcgaaaccacgtttaaaccagctgtagcgttgctgagaagtgccatgagtgaaactgtctggtactactcgcccctgactttgctgttgtaaacggtcatcgccgatggcctgcgccgcgttcagcgcctcttccagatcgccggtttccagaacgccttgctgctgcatactatgcccccagacaccggcaaaacagtcggcctggagttccatacgcacagataagcggtttacttccgcctgcgtcgcgttttgttgcagttgacgaactttcggctcgatgcctaacagtttctgcacatgatgaccgacttcatgggcgataacgtacccctgggcaaaatcgccatccgcgccaagtttgtctttcatgtcatcatagaaggagagatcgatataaaccgtgccatccgccgggcaatagaacggccccattatggactggcccgccccgcagccggtacgcgtcattccacggtacatgaccagcttcggttgctgataggtcttacccatcttctcgaactgttgtccccaggtgtcttccgtggttgccagaatcacgctggtgaattttgcggcttcgtcttcatttgggctaatactccgcgtactttgttgttgggaaaccggctgcccggtcatcaacccggttaaatcaacaccatagtagcctgcaaccagcacgactatcagtaaaatcagcccgcctttaccgcttggcaggcgaaaaccgggaccgcccatagatggaccaccagagctgttgcgcctgtcttcaacattgtcactttcacgtcgcccttgccaacgcatagatacctcaacaatatattcattatagaaatgatcgtaggtggttcagaggaagattaccacaggaaagcgggatgaaatggcggaggaatgagcgttcaatgcatatattccgagagcggttgtcttgccgtgccagctgcacggcaagatgatgaacagaaaaatcagtccagctgtacacccaggcggcgggcgacggcttcataggcttcgatcaggccaccgaggctctggcggaaacggtctttgtccattttctccagcgtttctttgtcccacaggcggctaccgtccggggagaactcatcacccagtaccacttcgcctttgtacagaccaaattccagcttgaagtcgaccagaatcagaccagcatcatcgaacagttttttcagcacgtcgttcgctttgtaggtcagctctttcatacgcgccaggttctctttgctcacccagccaaaggtttcgcagtaagattcgttgaccatcggatcgtgcatggcgtcgtttttcaggaacagatcgaacagcggcgggttcagctcaataccttcttcgattccaagacgtttcaccagagagccagcagcacggttacgcacgacacactcaaccggcaccatatccagctttttcaccagacattcggtatcggagagcagacgctccatttgagtcgggatacccgcttcagccagtttgctcataatgaagtagttgaacttgttgttcaccatacctttgcgatcaaactgctcaatgcgcgcgccatcccctgcactcgtatcattgcggaattcgagcaccaacaggtccgggttttccgtgctgtatacggttttcgctttaccacgatacaactcagcttgcttttgcatctttatcactcctgggtgtgaattaacgttttaaaatcttttgctgtctggtgtgccggatgttttgtcggatgcggcgtgaacgccttatccgaactacgtccgacaaacaaatttcgtgcgaattaccgctaaaatcgcgttttcctgcagacgcacacgtttgcgtatcatatcagaaaaaagggccggatgattccagccctgtatttttacttgctaaacgcagcctggaagacagctaccagcgcgtcgttctgactctgagtcagagtatgacctttcggatcgatgaactgtaggctgctgcggttatctaaatcgccaacctgcagtttatagtcaccggatgccaggcctggatcgctcgcgcccagttcctgccagtcgctgtcagacagcggcttataagttacggccatgttgccctggctacgggtgctgtcggtcactttcatgcccactttttccagcgccgctggcagacgttgccaaaccacattgaacggcccgcgtacgaccagcattggtaaaccggtgtcatcagctgcactttgtacgtccatagtggtggaggcacgattttgcgcagcgttcgcggcgtcagtggcagatttatccagaccggcggaaataacgttcatcatctccgtgctgtaacgctgcatggaagccgcgtctgcaaccggtttgcccgcctgttccaggttcagcagtttaaccgtaaccgcctgctgataaccctgcggcttaacagagatttgataacgaccacgatactgctcgtcttcgtccagacggttccattgtacccaatcggtggtcagtgtctgaccagcatcatcacgttgggtgatggtgtagtttttcgcctgcagcacgctaaccacctgcggccacagagtattgccacgaccattttccaccagcaaactagcggtatcgcccgtgaactgggtacgcgcgccagaaaccagtgccagcggctgggctggtggacgaatgtccagcgccttaccgacagcaccactaccgttggtcaccgggattgcataatcaccggaggtcaccggcaaaatcattccagccggggcatgaagctccgcaagcggtgccgcttccaggtaggcttcatcaccactgacctgacgcttatagcgactgtcagaactacaggcagcgagtaataaaacaaggctaacacccgcaacctttgccaggcggctcttttgaacagagtaagccatcaaatctccctaaactttacagcaaaccggcatgcttaagcgccgctctgaccgtctcacgaccactgtcggtgattggtgtcattggcaggcgcagcgtatcggtcgccacaagacccagttccttacatgcccatttcaccgggattggattgggttcgacaaatagtttgttgtgtaatggcatcagacgctgattaataacgcgtgcctcggcaaaatgcccttctgctgccagtttgcacatctgggccatatcacgcgctgcgacgttagccgtaacggaaataaccccatgaccgcccaattgcatgaagtccagcgcgctcgcatcatcgccgctcagcagaacaaaatcatcactaaccagctctttgatctggtttacacgcgttaagttccctgttgcctctttgattccgataatattttttactttcgccagacggcccaccgtttccgggagcagatcgcagccagtacgggacggcacattatacagaatttgcggcaggtcagtatgctcagcgatggctttgaaatgctgatacaaaccttcttggctcggacgattgtagtaaggggttaccgtcaggcagccgacgataccactgtcattgaagcgctgcgtcaggctaatggcttccgcagtagcgttagcgccggtcccggcaattaccggaatgcgcccatcagccagatccagcgtcatcatcaccacatcagcatgttcgtcatgatttaaggtagcggactcgccagtggtgccaacagaaacgatcgcgctagtaccgctggcgacatgataatcaatcagttttttcaagctagcccgacagacattacctttttcatccatcggagtaacaatcgcgacaatacttcccgtgaacatgggccatcctctgtgcaaacaagtgtctcaatggtacgtttggtatggcattaaaagcaagcagacagaaccgttctgattgttgtatgcatgtttttttatgctttccttaagaacaactcaccccttaaaggaataaccagtttgacactgagtagccaacattatctggtgatcactgcgttgggtgccgatcgccctggaattgtgaacaccatcacccgtcatgtcagtagttgcggctgtaatattgaagacagtcgcctggcgatgctgggagaagagttcacgtttattatgctgctttccggtagttggaatgccattactctgattgaaagtacgttaccgttgaaaggtgccgaactggatcttttaatcgtgatgaagcgcacgacggcgcgtccgcgtccgccaatgccagcatctgtctgggttcaggtcgatgtggcagactccccgcatttaattgaacgcttcacagcacttttcgacgcgcatcatatgaacattgcggagctggtgagccgcacgcaacctgctgaaaatgaacgggctgcgcagttgcatattcagataaccgcccacagccccgcatctgcggacgcagcaaatattgagcaagcgttcaaagccctatgtacagaactcaatgcacaaggcagtattaacgtcgtcaattattcccaacatgatgaacaggatggagttaagtaatgaatccactgaaagccggtgatatcgcaccgaaatttagcttgccggatcaagacggagaacaagttaatttgaccgacttccagggacagcgtgttctggtttatttctacccgaaagccatgacccccggctgtaccgtacaggcctgcggcttacgcgataacatggatgagttgaaaaaagcgggcgttgatgtgctgggtatcagcaccgataaacccgaaaaactctcccgttttgcggaaaaagagctgcttaactttacgctcctgtctgatgaggaccaccaggtgtgcgaacaattcggcgtctggggtgaaaagtccttcatgggcaaaacctacgatggcattcatcgcatcagcttcctgattgacgctgatggcaaaatcgaacatgtctttgacgatttcaaaaccagcaatcaccacgacgttgtgctgaactggctgaaagaacacgcctgattactttgctccattccgtgctggctgcgcttgcggccagcatacctcacttctcgtgatcaagatcacattctcgctttcccctgcgacacgggtgtcgaatccattttttgctgaacgttaatgaccatcatttttgtaccgttcagaatccagttaatacataacttattgaatatattgagttaatcagaatggcatcctttatgcaatatgaaatgcaatgtttcatatcattttcaaggagccgacatgaaccgctttgtggtggccgaaccactgtggtgtacaggatgtaatacctgtctcgctgcctgtagcgacgtgcataaaacgcaaggtttacagcaacacccgcgcctggccctggcgaagacgagtacaatcactgcccctgtcgtgtgtcatcactgtgaggaagccccttgcctgcaggtctgcccggtcaatgccatctctcagagggatgatgcgatccaactcaacgaaagcctctgtattggctgcaagctttgcgccgtggtctgcccatttggcgcaatcagcgctagtggaagccgtccggtgaatgcccatgcgcaatatgtttttcaggctgaaggcagtctcaaagacggcgaagaaaacgcgccaacacaacatgctttgctgcgctgggaacctggtgtccagaccgtcgcggtgaaatgcgacctgtgtgatttcttgccagaaggtccggcctgcgttcgcgcttgcccgaatcaggcgttacggctgatcaccggtgatagcctgcaacgtcagatgaaagaaaaacagcgccttgccgcaagctggtttgccaatggcggggaggatcccctttccctcactcaggagcaacgctaatggatgccctgcaattattaacctggagcctgattctctatctgtttgctagtctggctagcctgtttttactcggcctggacagactggctattaagctttccggcatcacaagcctggtgggcggcgtgattggcatcatcagcggaattacgcaattacatgctggtgtaactttagtcgcccgttttgcccccccttttgaatttgccgatttaaccctgcgaatggatagcctcagcgcatttatggtgctggttatctccttgctggtggtggtttgttctctctatagtttgacttatatgcgcgaatacgagggcaaaggcgcggcggcgatgggcttctttatgaatattttcatcgcaagcatggttgccctgctggtgatggacaacgctttttggttcatcgtgctgtttgaaatgatgagcctgtcttcctggtttctggtcattgccaggcaggataaaacgagcatcaacgctggcatgctctacttttttatcgcccacgccggaagcgtgctgataatgatcgccttcttgctgatggggcgcgaaagcggcagcctcgattttgccagtttccgcacgcttagtctttctccggggctggcgagcgcggtgttcctgctggcctttttcggttttggcgcgaaagccgggatgatgccgttgcacagctggttgccgcgcgctcaccctgccgcaccaagccacgctagcgcgttgatgtctggcgtaatggtcaaaataggtattttcggcatcctgaaagtagcgatggatctgctggcgcaaacgggtttgcctctgtggtggggcattctggtgatggcgatcggcgcaatctccgcgctcctgggcgtgctatatgcgctggcggaacaggatatcaaacggctgctggcctggagtaccgtcgaaaacgtcggcattattttgctggcagtcggtgtggcgatggtcggtctgagtctgcacgacccgctgctcaccgtggttggactgctcggcgcactgtttcatctgctcaaccatgcgctgttcaaagggctgctatttctcggcgcgggagcgattattagccgtttgcatacccacgacatggaaaaaatgggggcactagcgaaacggatgccgtggacagccgcagcatgcctgattggttgcctcgcgataagcgccattcctccgctgaatggttttatcagcgaatggtacacctggcagagcctgttcagtctaagtcgtgtggaagccgtagcgctacaacttgcgggtcctattgctatggtaatgctggcagtcactggtgggctggcagtaatgtgcttcgtaaaaatgtacggtattactttctgtggtgcgccgcgcagtacacacgctgaagaggcacaggaagtgccaaatacgatgatcgtcgccatgctactgctcgcggcactctgcgtattaattgcgcttagtgccagttggctggcaccgaagataatgcatattgcccatgcgtttaccaatacccctcccgccactgtcgccagcggaatagcacttgtacccggcacgtttcatacacaggtcacccccagtttactgttgctgttactactggcgatgcctttgctgcctggcctttactggctgtggtgtcgtagccgccgcgcagcgtttcgtcgcacaggagatgcctgggcatgcggctacggctgggaaaatgcgatggccccgagtggcaatggcgtgatgcagccgctgcgtgtggtcttttctgcgctatttcgtctacgacaacagctcgaccctacgctgaggctaaataaaggtcttgcgcacgtcaccgccagggctcagagcacagaacccttctgggatgagcgggtgatccgccccatcgtgagcgccacccaacggctggccaaagaaatacagcatctgcaaagcggcgactttcgtctctattgcctgtatgtggtcgccgcactggttgtgctgctaatcgctattgccgtctaaggaaatcaccatgagacaaactctttgcgacggatatctggtcatttttgcgttagcacaggccgtgattctgctgatgctaatcccactttttacgggtatttcccggcagatacgcgcgcgtatgcactcccgccgcgggccggggatctggcaggattatcgcgatatccacaaactgtttaaacgccaggaagttgcgccgacatctagtggtctgatgttccgcctgatgccgtgggtattaatcagcagcatgctggtgctggcgatggccttaccactgtttattaccgtttccccttttgcgggcggcggcgatctgatcacccttatctatcttcttgccctgtttcgttttttctttgctctttccgggctggataccggaagtccgtttgcgggagtcggtgccagtcgcgagttgacgctcggcattctggtcgaaccaatgcttattctcagtctgctggtattggcgctgatagcaggttccacgcatatcgagatgatcagcaatacgctggcgatgggctggaacagcccgctaaccaccgtactggcgttactggcctgtggttttgcctgcttcattgagatgggaaaaattccctttgatgttgctgaagcagaacaggaattacaggaaggcccgctgaccgaatattccggtgccgggctggcgctagcgaaatgggggctggggctgaaacaggtcgtgatggcaagtctgtttgtggccctgtttctgccctttgggcgcgcgcaagaactttctctcgcctgcctgctgactagtcttgtcgttacgctgctcaaggttttgctgatttttgtactggccagtatcgcagaaaacacgctggcacgcgggcgttttttactcattcaccatgtgacctggcttggcttcagccttgctgcgcttgcatgggtcttctggttaaccggtctgtaaggagcactgacggaatatggaaaatcttgctctgacgacgttattgctgccttttatcggcgcactggtcgttagctttagcccacaacgtcgggccgccgaatggggggttttgttcgccgcgctgaccacgctgtgcatgttgagtctgatctccgcgttttatcaggccgataaagttgccgtcacgttgacgttggtcaacgtgggggatgtggcgttgtttggcctggtcattgatcgcgtgagtacgctgattctgtttgtggtggtgtttctcggtttgctggtcacgatctactccacgggttatctgacggataaaaatcgcgaacacccgcataacggcacgaatcgttattacgcatttttactggtgtttatcggcgcgatggcgggactggtactctccagcacgctgctcggtcagttgttgttttttgaaattacaggcggctgctcctgggcgttgatcagttattaccagagcgataaagcgcagcgtagtgcactaaaagcgttacttatcactcatatcggcagcttggggttgtatcttgccgccgccacgctgtttttgcagaccggaacgtttgcgcttagcgcgatgagcgagttacacggcgacgcacgttatctggtttatggcggcatcctgtttgccgcgtgggggaaaagcgcccagctaccgatgcaagcgtggctaccggacgcaatggaagcgccaacaccgatcagcgcctatctccacgccgcaagcatggtgaaagtgggcgtttacatttttgcccgcgctattatcgacggcggcaatatcccgcatgtgattggcggcgttggcatggtcatggcactggtcaccattctttatggctttctgatgtatttgccacagcaggatatgaagcggttgctagcctggagcaccatcactcaacttggctggatgttcttcggcttgagcctctccatcttcggcagccggctggcgctggagggcagcatcgcctacatcgtcaaccacgcgttcgctaaaagcctgtttttccttgtagcaggtgcgctgagttacagctgcggcacgcgcttgttgccgcgtctgcgtggcgtattgcacaccctgccgttgccaggcgtgggtttctgcgtggcagcgctggcgattaccggcgtgccgccgttcaacggcttcttcagtaaattcccgctgtttgctgccggttttgcgttgagtgtggagtactggatcctgctgcccgccatgattcttctgatgattgaaagcgtcgccagtttcgcctggtttattcgctggtttggtcgcgttgtgcctggcaaaccgagcgaggccgtcgccgatgccgcaccgctgccaggaagtatgcgcctggtgttgattgtactgattgtgatgagcctgatttccagcgtaatcgccgcgacctggttgcagtaaggagatgatgaatgaccggttctatgatcgtaaataatctggcgggactgatgatgctgacaagcctgtttgtgattagcgtcaaaagctatcgcctgagttgcggattttacgcctgccagagtctggtgctggtgtctattttcgccactctcagctgcctgttcgccgcagagcaactgctgatctggtccgccagcgcctttatcaccaaagtgctgctggtaccgttaatcatgacttacgctgcacgaaatattccccagaacatcccggaaaaagcgttattcggtccggcaatgatggcactgctcgcggcgttaattgtcctgctttgcgcatttgtcgttcagcccgtgaagctaccgatggctaccgggctgaaaccggcgctggcggtagcgttaggtcattttctgcttggcctgctgtgcattgtcagccagcgcaatatcctgcggcaaatttttggttactgcctgatggaaaacggctcccatctggtgctggcgcttcttgcctggcgagcaccggaactggtggaaataggtatcgctaccgacgccatcttcgccgtcattgtgatggtgttactggcaagaaaaatatggcgtacccacggcacgctggacgtgaacaacttgaccgcgctgaagggataatgagatgagttattctgtgatgttcgctttactcctgctcacgccgctgctttttagcctgctctgttttgcctgccggaaacggagactttctgcgactcgcacggtgaccgtattacatagcttagggatcacactgctgctgattctggcactctgggtggtccaaactgccgctgatgcaggagaaatattcgctgcgggactgtggcttcatattgatggtctgggcggtttgttcctcgccattcttggtgtgattggctttctcaccggtatttacagcattggctacatgcgtcatgaagtggcacacggcgagcttagtcccgttacgctgtgcgattactacggtttcttccatctgtttttgttcaccatgctgctggttgttaccagcaataacctgattgtgatgtgggcggcgatcgaagccaccaccttaagcagcgcgtttctggtaggcatttacggtcagcgtagtagcctggaagctgcatggaagtacatcattatttgtactgttggtgtcgcttttggtctgttcggtaccgtgctggtatacgccaacgccgccagcgttatgccgcaggcagaaatggcgatattctggagcgaggttcttaagcaaagctccttgcttgacccaacattaatgctgttggcctttgtgtttttgctaattggctttggtaccaaaaccgggctatttcccatgcacgcctggctgccggatgctcacagtgaagcgccgagtccggtcagcgccctgctctccgccgtattgctgaactgcgcgctgttggtgctgattcgctattacatcattatttgccaagccatcggcagcgatttccccaaccggttgttgctcatcttcggcatgttgagcgttgccgtggcggcatttttcattctggtacagcgggacattaagcgtctgctggcgtactccagcgtggagaacatggggctggtcgcggtggagctaggcattggcgggccgctgggaatttttgccgcgctgctgcacatcttaaaccacagtctggcaaaaacgctgctgttctgcggttccggcaatgtactgctcaagtacggcacgcgcgatctcaacgtcgtctgtgggatgctcaaaatcatgccatttaccgccgtgctgtttggcggcggtgcgctggcgctggcagggatgccgcccttcaacatttttcttagcgaatttatgaccattaccgccggactggcacgtaatcacctgctgattatcgtcctgctgttattgctgttaacgctggtgctggcgggcctggtacggatggctgcgcgggtgttaatggcgaaaccgccgcaggccgttaaccggggtgatctcggctggttgaccaccagcccaatggtgattctgctggtcatgatgctggcgatgggaacgcatattccacaacctgtcatcaggatcctggcgggcgcttccactatagtcctcagtgggacgcacgatctgcctgcacaacgtagcacctggcatgattttttgcctagtggcaccgcatctgttagcgagaaacacagtgaacgttaatagtagcagtaatcgtggcgaagcgattctcgccgccctgaaaacgcagttccccggcgcggtgctggatgaagagcgacaaacgcctgaacaggtcaccattacggtgaaaatcaatctgctgcctgacgttgtacagtatctttattatcaacatgatggctggcttccggtcctgtttggcaacgacgagcggacacttaacggtcattacgcggtttattatgcccttagtatggaaggggccgaaaaatgctggattgtggtgaaggcgctggtcgatgccgacagtcgggagtttccgagtgtcacaccgcgcgtccctgccgcggtctggggcgagcgagaaattcgcgatatgtacgggctgattccggttggcctgccggatcagcgtcgcctggtgttgcccgatgactggccggaagatatgcatccgctgcgcaaagatgcgatggattatcgactgcgccctgaaccgacgactgattccgaaacgtatccgtttatcaatgagggcaacagcgatgcgcgggtgatccctgtcggcccgctgcatatcacctccgatgaaccgggtcacttccgcttgtttgtggatggcgagcaaattgtcgatgctgattaccgcctgttttatgtccatcgcggcatggagaaactggcagaaacgcggatgggctacaacgaagtgaccttcttaagcgaccgcgtgtgtgggatttgcggttttgcccacagtgtggcctataccaatagcgttgaaaatgcactggggattgaggtgccgcaacgagcacatactattcgcagcattctgctggaagtcgaacggctacacagtcatttgcttaaccttggcctctcctgccatttcgttggttttgataccggctttatgcaatttttccgcgtgcgggaaaagagcatgacgatggcggaattgctgatcgggagccgtaaaacctacggtctgaatctgattggtggtgttcgccgcgatattctcaaagagcaacgtctgcaaacgctgaaactggtgcgcgagatgcgcgccgacgtgagcgagctggtagagatgctgcttgctacgccgaatatggaacaacgcactcagggcattggcattctcgaccgacaaatcgcccgtgatttgcgctttgatcacccctacgccgactacggcaatattccaaaaacactgtttacctttaccggcggcgatgttttctcccgcgtgatggtccgtgtcaaagagacgtttgatagcctggcaatgctggaatttgccctcgacaacatgccggataccccactgctgaccgaaggctttagctataaacctcacgcattcgcgctgggctttgttgaagcgccacgcggtgaagacgtgcactggagcatgctcggtgataaccaaaaattgttccgctggcgctgccgtgccgccacctacgccaactggccggtgttgcgttacatgctgcgcggcaataccgtttctgacgcaccgctgattatcggtagccttgatccctgctactcctgtaccgaccgtgtgacgctggtagatgtgcgcaagcgccagagtaaaaccgtgccgtataaagagatcgaacgctacggcattgatcgtaaccgtagcccgctgaagtaaggacagaagatgctgaagttactgaaaactattatgcgcgccggaaccgcgacggtgaaatatcccttcgcgccactggaggtcagccctggctttcgcggaaaaccggacctgatgcccagccaatgtattgcctgcggtgcctgcgcctgtgcttgtccggcaaatgcgctggctatccagaccgacgaccagcaaaatagccgcacctggcagctctatctggggcgttgtatttactgcggacgttgtgaagaagtgtgcccgaccagagccatccagcttaccaataactttgaactgaccgtcaccaataaagccgatctctatacccgcgcgacgttccatctacaacgttgcagccgttgcgaacgcccgtttgccccgcaaaaaaccatcgcactggctgctgaattgttagcacagcaacaaagtgcgccacaaaaccgcgaaatgttgtgggcgcaagcgagcgtctgcccggaatgcaaacaacgcgcgacgctgatcaacgacgatacagatgtactgctggtggctaaggagcagctatgagtccagtgcttacacaacatgtcagccagcccatcacgctggacgagcaaacgcaaaagatgaagcggcatttgctacaggatatccgtcgcagcgcttacgtttatcgcgtcgattgcggcggctgcaacgcctgtgaaatcgaaatttttgctgccattacaccagtattcgacgcagaacgttttggcattaaggttgttagtagtccgcgtcacgccgatattttgttatttactggcgcagtcacccgggcgatgcgtatgcctgcacttcgggcgtatgagtctgcccccgatcataaaatttgtgtttcctacggcgcgtgcggtgtcggcggcggtattttccacgatctctacagcgtctggggcggtagcgacaccattgtccccattgatgtttggatccccggctgcccgccaacaccggccgccaccattcacggtttcgccgtggcgctcggtttgctgcaacagaagattcacgctgtggattatcgcgatcccaccggggtgactatgcaaccgttgtggccgcagatcccgccaagtcagcgtatcgccattgagcgagaagcgcggcggctggcgggctatcgtcaggggcgagaaatttgcgatcggctcctgcgccatttaagcgacgatcctacaggaaatcgggttaacacctggttgcgcgatgccgacgatccacgtctcaatagtatcgttcagcaactctttcgcgtactccgggggttacatgactgaagagtgcggggaaattgttttctggacgctgcgaaaaaagtttgtcgccagtagcgacgagatgccggaacacagctctcaggtaatgtattacagcctagctatcggccatcacgttggcgtgattgattgtctgaatgtcgccttccgctgcccactgacggaatacgaagattggcttgcactggtcgaagaggagcaagcccgacgtaagatgctgggggtgatgacttttggtgagattgttattgacgccagccacaccgccctgttgacccgggcattcgcgccactggcggatgacgcgacgtctgtgtggcaggcgcgtagcattcaattcattcatctgttggatgaaattgtgcaggaaccggccatctatctgatggccagaaaaattgcgtgagaaggatttctcattaataaggactgttgatggctatgagtgacgaggcgatgtttgccccgccacaaggaataacaattgaagcggtaaacggaatgctcgcggagcggttagcacagaaacacggcaaggcgtctttattacgcgccttcatcccgctgccgccgccgttcagcccggtacaacttattgaactgcatgttctcaaaagcaacttctattaccgctaccatgatgatggcagcgatgtgacggcaacaacagagtatcagggcgagatggtcgattatagccgtcacgccgtccttctcggcagtagtggaatggcggagctacgctttattcgcacccacggcagtcgttttacttcccaggattgcacactgtttaactggctggcgcggataatcaccccggttctgcaaagttggctcaatgatgaagaacagcaggtggcgctgcgtttgctggagaaagatcgcgatcatcatcgggtactggttgatattactaatgcagtgctgagtcatcttgatctcgacgatctgatcgctgacgtcgctcgtgagatccatcattttttcggtctggctagtgtcagtatggtactgggcgatcatcgaaagaacgagaagttcagcctgtggtgcagcgatctttctgccagtcattgtgcgtgtctgccacgctgtatgcctggcgaaagtgtattgctgacacaaacgctacaaacccgacaaccgaccttgacgcaccgtgcagatgatctgtttctctggcaacgcgacccgttattactcttacttgcatctaacggctgcgaatctgcgctccttataccgcttacctttggcaaccatacaccgggtgcattgttgctggcgcatacctcttccactctctttagtgaggaaaactgccagctactacaacacatagccgatcgcatcgctattgccgttggcaatgccgatgcctggcgtagcatgaccgatttgcaggaaagtttgcagcaagaaaaccaccagcttagcgagcagctccttagcaatctgggcatcggtgacattatctatcaaagccaggcaatggaagacctgctccagcaggtagatattgtggcgaagagcgacagtacggtgttgatttgtggtgaaaccggaactggcaaagaggtgatcgccagagcgatccatcaacttagcccgcgacgcgacaagccgctggtcaaaatcaactgcgctgccatccccgccagtcttctggaaagtgagttattcggtcatgacaaaggggcgtttactggtgcgattaatacccatcgtggtcgttttgaaattgccgatggcggcacgttgtttctcgatgaaattggcgatctgccgttagaacttcagcctaaactgctgcgcgtattgcaggagcgggagattgagcgtctcggcgggagtagaacgatcccggtgaatgtcagagtcattgccgccaccaaccgtgatttgtggcaaatggttgaagatcgccagtttcgcagcgatctcttttatcgcctgaatgtcttcccactggaattgccgccgctacgcgaccgtccggaagatatccctcttttagcaaaacatttcacgcaaaaaatggcgcgccatatgaatcgcgcaattgacgccatcccgaccgaggcactacgccagttgatgagctgggattggccgggcaacgtgcgcgagctggaaaacgtgattgagcgggcggtactgttgactcgtggtaacagtctgaatttacatctaaatgtccgacaaagccgtttactgccgacgctaaatgaagatagtgcgcttcgcagtagtatggcgcagttactgcacccgacgacgccagagaatgacgaagaagaacgtcagcgcattgttcaggtattgcgagaaaccaatggcattgttgccgggccccgtggcgcagcgacgcgattagggatgaagcgcaccacgctgctgagtcgaatgcagcggctggggatcagcgttcgcgaggtgttgtaatctgcttttgcaggagtatgcatgagaaacaaactctctttcgacttgcagttgagcgccagaaaagcggcaatcgctgaacggattgccgcccataaaattgcccgcagtaaagtgagcgtctttttaatggcgatgtccgctggcgtgtttatggcgatcggatttactttttacctttccgttatcgccgatgccccgtctagtcaggcattaacccatctggtgggcggcctttgctttacactcggctttattttgctggcggtttgcggcaccagcctgttcaccagcagcgtaatgacggtgatggcaaaaagtcggggcgtcattagttggcgaacttggctgattaacgcacttctggtggcctgcggtaatctggcaggtattgcctgtttcagtttgttaatctggttttccgggttggtgatgagtgaaaacgcgatgtggggagtcgcggttttacactgcgccgagggcaaaatgcatcatacatttactgaatctgtcagcctcggcattatgtgcaatctgatggtttgcctggcgctgtggatgagttattgcgggcgtagcttatgcgacaaaatcgtcgccatgattttgcccatcaccctgtttgtcgccagtggctttgagcactgtatcgccaatttgtttgtgattccgttcgccattgccattcgccatttcgcccctccccccttctggcagctggcgcacagtagcgcagacaattttccggcactgacggtcagccattttattaccgccaatctgctcccggtgatgctgggtaatattatcggcggtgcggtgctggtgagtatgtgttatcgggctatttatttacgtcaggaaccctgaaaaatcagcccggcgaaacagttcgtcgggctgaagattattcttgcgcgatttgcccatcgggccaggcatgaatcacggctttgatcagcgtcgccaacggaatggcgaagaatacgccccagaatccccacaaaccaccgaagatcaccacgcttaaaataatcaccagcggatgcaggttaaccgcttcggagaacaacaccggcactaacaggttgccgtccagcgcctgaataatcagatacaccgcgaagcagctccagaattcagtacctgcgccaaactggaatagcgccacgccaaccaccggaatggtcaccacaaatgcgccaatgtacggaataagaacgctgaagccgaccagcactgccagcagcaggctatagttcagcccgaagagcaagaaccccagccaggtggcgatccccaccacgatcatctccagcactttgccgcggatatagttggtgatttgttgattcatctccttccacacctgtcctgccagcccacggttacgcggcagcacccggcgaacggcgttcagcatctgctctttgtctttcagcaggaagaagaccatcaatggcaccagcaccagatagacggctatggtcagcaaaccgaccaggctggcgagggaaattttcaccacgctatcgcccatggtcagcatccgactgcgcatattttcggccattgcatcaataatgcccgcgtccattaacgccggatagcggcgcggcaacgtggcggcaaagtcagaaagcttattgagcatccccggcatatcgcggattaagtagatgccctgttgccaggcgataggcagtaccacgaacgccatcagtagcaatataccgacgaaaaccaccaatacaatgctcgtcgcccagcggcgggagcagccaatagattgcagacgcacggttggccattccagcaaataggccagcacaatagccaccagcaacggagcaagcaggccactaaagaaaaagataatgccaaatccggcaactaaaataaccagcaaggcaatcgcttccgggtcgctaaaacggcggcgataccattgcatcaacatttcgagcataaagaccttccctgaacctcaagagcgggattgcgatccgcaattgtatcgaaatgtcacaaaaaagacttcgctttttatgacggattcaggaaactgaaaagtcatttgagtgggctaatcttcgccgttacactcaaaggcggcgcggtgggaacgatatttcacagtatcggtcaaatgactatctccagaaatacaggatagaggttatgttcaggcagttgaaaaaaaacctggttgcaaccctcattgctgctatgaccattggtcaggtagccccggcgtttgccgacagcgcagacaccttgccggatatgggaacctccgcaggaagcacgctttccattggtcaggaaatgcagatgggcgactattatgtccgccagctacgcggcagcgcgccgttaattaatgacccgctgttaacgcaatatattaatagcctggggatgcgtctggttagccatgccaatagcgttaagacaccgtttcatttttttctgatcaacaacgacgaaattaacgcctttgctttctttggcggcaacgtggtgctgcactctgccctgttccgttattccgataacgaaagtcaactggctagtgttatggcgcacgaaatctcccacgtcacccaacgtcacctggcgcgagcgatggaagatcagcagcgcagcgcgccgctgacctgggtcggcgcgttaggttctattttactggcgatggccagtccgcaggcggggatggcggcgctgaccggtacactggcgggaacgcgtcaggggatgatcagtttcacccagcaaaatgaacaggaagcggaccgcattggtattcaggtgctgcaacgcagcggattcgatccgcaggcgatgccaaccttcctcgaaaaattactcgatcaggcgcgttactccagccgcccgccggaaattttattgactcacccgttgccggaaagtcgtctggcagatgcccgcaaccgtgctaatcagatgcgcccgatggtggtgcagagcagcgaagatttctatctggcgaaagcgcgcacactggggatgtataattccggacgtaaccagctcaccagtgatttgctggatgaatgggcgaaaggaaacgttcgtcagcaacgagcagcacaatatggtcgtgctttacaggcgatggaagccaataaatacgacgaggcgcgtaaaacgctgcaaccgttactggcggcagaacctggcaacgcatggtatctcgatctggctactgatatcgatcttgggcaaaacaaagccaatgaggcgatcaatcgtctgaaaaatgcccgcgatttacgcaccaatccggtgttgcagctcaacctggcgaacgcttatttgcaaggcggtcaaccacaagaagcggccaatattctgaatcgctacacctttaataataaagatgacagcaacggctgggatttgctggcacaggcggaagccgcgctaaataaccgcgatcaggagctggctgcgcgagcagaaggttatgcgctcgccggacgactcgatcaggccattagcctgttgagtagcgccagtagccaggtgaaattaggcagcctgcaacaagcgcgttacgatgcgcgcatcgaccagttgcgccagctgcaggaacgctttaagccttataccaagatgtaattcgcattaaaggaagaacaatgaccaaacaggtaaaaatctaccataacccacgctgtagtaagagccgggaaacgctgaacctgctgaaagaaaacggcgtggagccagaagtggtgctctaccttgagacacccgccgatgcggcaacgctgcgcgatttgctgaaaatactggggatgaatagcgcccgtgaattgatgcgccagaaagaggatctttataaagaactgaacctggctgacagtagccttagcgaagaggcgctgattcaggcaatggtggataatccgaagctgatggagcgcccgattgtggtcgcgaatggcaaagcgcggattggtcgtccaccggagcaggtactggaaatcgtgggttaagatgtgctccatcgctagttgaagcacattgccggatgcgacgcttgccacgtcttatccggcctacgaatactatggattaacttcgcgtagttcggataaggcgttcgcgccgcatccgacaataaacaccttatttacaacttcagaatttctttcacaaacggaatggtcagcttacgttgcgcggtaatgctcgcacgatccaactgatccaacgtcataaatagcgtgcgcatttctctgtcgagccgcttcagcaagaaacgccccacatcttccggcagttcaaaaccacgcaaacgcgcgcgtaactgtagcgcctgcaacttatcttcatcagaaagtggctgcaatttgtagatctgcccccagtcgagtcggctcgcgagatccggtaatcccagattcaactgccgcggtggacgatcgccggtgatcaacaaccgtgttttgccgctttccagaattcgattgtagagatcgaaaatcgccatctcccacaactcatcgcctgcaatacactcaatgttgtcgatacagaccaggctcaaatgctccataccgtcgagcacttccggaacaaaccaggtgcgtttatccagcgggacatagcccaccgcatcgccacgctggctcaattccgcgcaagccgcgtgcagcagatggctgcgccccgcgccttcgcgtgcccagagatagatgtaaccgctatgttcctgacgcagcacgttttgcagcgcggccagtaaagaggagttatcccccggccagaaacttgcaaaggtttcgtcgtcaggaagataaagtggcaaagagagctgtgccggtgtgttcagagatacctcaaccaggatttcacaaaatcggctgaagtttaccacagaatcccatgatgtttgaaccgggcagcaacactgcccggtcggtacattatttgtctgttatatccgcgtcttctgcgtccagcaccacttcttcagggcgcagcacactgatcagtttgaagatcaaacttaagccgataccgacgatggtcgccagcgccataccttttaactccgccgcgccgatgtttaccttcgcgccactgacgccgatgatcaaaatcacggaagtcaggatcaggttctgtgctttgttgtaatccactttgctttcgatcaaaacacgaataccggaagcaccgatgacaccataaagcagcaggctaacgccgcccatcaccggcaatgggatcatctggatagcggcagccagtttaccgacgcaggaaagcaggatagcgaaaatcgccgccccgccgataacccaggtactgtaaacacgggtgatcgccatcacgccaatgttttctccgtaagtagtatttggcgtagagccaaagaagccggaaatcacggtgctcaagccattagcaaacatgctacggtgcagacctggatcgcgcagcagatcttttttgacgatattagccgttactaccaggtgccctacgtgttcggcaataaccactaacgccgctggcagaatagtcagaatggcaaaccactcgaagcgcggcgtatagagggttggcagcgcaaaccagtgagcattaataatcggcgtggtatcgacaattcccattgcgaaagagagcgcgtaccccaccagcacgccaattaaaatcgggataattgccaggaaaccacgaaacagcacggaacctaaaaccgtgaccgccagggtggtaatagagatgatgatggttttggagtctggcgtttgcccttcagccgggagtaaacccgccataccggcagctacgcccgccagctccagaccgatgacggcaacgattgcgcccattgccgcaggtggaaacagcacgtccagccagccggtccccgctttcttcacgataaaagaaaccaggcagaacagcacgccgcacataataaagccgcccagcgcgacttcataccctaacggcaacagtaacaataccggactaataaaggcaaagctggaaccaagataagccggaattttccctttacagatgaagagatacagcagcgttccaataccgttaaataacagtacagtcgccgggttaatatgaaataagacgggcaccaggacggttgcaccaaacatggcgaacaaatgttgcaaactaagcgggattgtctgtaaaagtggcggtctttcactcaccccgatagcacggcgcgtcatagtattatcctctgtattatgtgttataggcgctttactcaaaaaaaagccgactcttaaagtcggctttaattatttttattctttatttcgtaccaaagattttgtcaccggcatcgccgaggcccggaataatgtatccgtgctcgttcagtccctgatcaatgcttgcggtatacagttcgacgtccgggtgcgctttttccagcgcagcgataccttctggcgcagctaccagcaccagaactttgatgctgctgcagcccgcttttttcagcaggtcgatggtcgcgataacggaaccaccggttgccagcattgggtcaacgatcagcgccatacgctcatcgatgttagaaaccagtttctggaagtacggtaccggctccagcgtttcttcattacggtacataccgacaacgctgatgcgcgcgctcggaacgttttccagcacaccgtccatcataccaagacccgcacgcagaattggcacaacggtaattttcttacctttgatctggtcgatttctaccgggccgttccagccttcgatagttactttttccgtttcgaggtcggcggtcgcttcgtaagtcagcaggctacccacttcggaagcgagttcgcgaaagcgcttggtgctgatatcttgctcacgcatcagtcccagcttgtgtttgacgagtgggtgtttgacttccacgatcttcatactctttctcctttgaggggcagccacaaaaaaaatcgacggattatacctcctttcttcaaggcggcaatattcttttcgttgactttagtcaaaatgataacggtttgagataaagttattttatattcagatggttatgaaagaagattattccatccgaaaactaacctttaccctggcacaagtcttctttcgccgcgcgcctggggaaaagacgtgcaaaaaggttgtgtaaagcagtctcgcaaacgtttgctttccctgttagaattgcgccgaattttatttttctaccgcaagtaacgcgtggggacccaagcagtgaccgataaaacctctcttagctacaaagatgccggtgttgatattgacgcgggtaatgctctggttggaagaatcaaaggcgtagtgaagaaaacgcgtcgtccggaagtgatgggcggtctgggcggcttcggtgcgctgtgtgcattgccgcaaaaatatcgtgaacccgtgctggtttctggcactgacggcgtaggtaccaagctgcgtctggcaatggacttaaaacgtcacgacaccattggtattgatctggtcgccatgtgcgttaatgacctggtggtgcaaggtgcagagccgctgtttttcctcgactattacgcaaccggaaaactggatgttgataccgctagtgcggtgatcagcggcattgcggaaggttgtctgcaaagtggctgtagtctggtgggtggcgaaacggcagaaatgccggggatgtatcacggtgaggattacgatgtcgcgggtttctgcgttggcgtggtagaaaaaagtgaaatcatcgacggctctaaagtcagcgacggcgatgtgctgattgcactcggttccagcggtccacacagcaacggctatagcctggtgcgcaaaattcttgaagtcagcggttgtgatccgcaaaccaccgaacttgatggtaagccattagccgatcatctgctggcaccgacccgcatttacgtgaagagtgtgctggagttgattgaaaaggtcgatgtgcatgccattgcgcacctgaccggcggcggcttctgggaaaacattccgcgcgtattgccagataatactcaggcagtgattgatgaatcttcctggcagtggccggaagtgttcaactggctgcaaacggcaggtaacgttgagcaccatgaaatgtatcgcaccttcaactgcggcgtcgggatgattattgccctgcctgctccggaagtggacaaagccctcgccctgctcaatgccaacggtgaaaacgcgtggaaaatcggtatcatcaaagcctctgattccgaacaacgcgtggttatcgaataatgaatattgtggtgcttatttccggcaacggaagtaatttacaggcaattattgacgcctgtaaaaccaacaaaattaaaggcaccgtacgggcagttttcagcaataaggccgacgcgttcggccttgaacgcgcccgccaggcgggtattgcaacgcatacgctcatcgccagcgcgtttgacagtcgtgaagcctatgaccgggagttgattcatgaaatcgacatgtacgcacccgatgtggtcgtgctggctggttttatgcgcattctcagcccggcgtttgtctcccactatgccgggcgtttgctgaacattcacccttctctgctgccgaaatatcccggattacacacccatcgtcaggcgctggaaaatggcgatgaagagcacggtacaagcgtgcatttcgtcaccgatgaactggacggtggcccggttattttacaggcgaaagtcccggtatttgctggtgatagcgaagatgacatcacagcccgcgtgcaaacccaggaacacgccatttatccactggtgattagctggtttgccgatggtcgtctgaaaatgcacgaaaacgccgcgtggctggatggtcaacgtctgccgccgcagggctacgctgccgacgagtaatacccccgtaattaaagcgccagctctgccgctggcgtttttcaattcacctgtaaatcgcaagctccagcagtttttttcccccttttctggcatagttggacatctgccaatattgctcgccataatatccaggcagtgtcccgtgaataaaacggagtaaaagtggtaatgggtcaggaaaagctatacatcgaaaaagagctcagttggttaagcttcaatgaacgcgtgcttcaggaagcggcggacaaatctaacccgctgattgaaaggatgcgtttcctggggatctattccaataaccttgatgagttctataaagtccgcttcgctgaactgaagcgacgcatcattattagcgaagaacaaggctccaactctcattcccgccatttactgggcaaaattcagtcccgggtgctgaaagccgatcaggaattcgacggcctctacaacgagctattgctggagatggcgcgcaaccagatcttcctgattaatgaacgccagctctccgtcaatcaacaaaactggctgcgtcattattttaagcagtatctgcgtcagcacattacgccgattttaatcaatcctgacactgacttagtgcagttcctgaaagatgattacacctatctggcggtggaaattatccgtggcgataccatccgttacgcgctgctggagatcccaagtgataaagtgccgcgctttgtgaatttaccgccagaagcgccgcgtcgacgcaagccgatgattcttctggataacattctgcgttactgccttgatgatattttcaaaggcttctttgattatgacgcgctgaatgcctatagtatgaagatgacccgcgatgccgaatacgatttagtgcatgagatggaagccagcctgatggagttgatgtcttccagtctcaagcagcgtttaactgctgagccggtgcgttttgtttatcagcgcgatatgcccaatgcgctggttgaagtgttacgcgaaaaactgactatttcccgctacgactccatcgtccccggcggtcgttatcataattttaaagactttattaatttccccaatgtcggcaaagccaatctggtgaacaaaccactgccgcgtttacgccatatttggtttgataaagcccagttccgcaatggttttgatgccattcgcgaacgcgatgtgttgctctattatccttatcacacctttgagcatgtgctggaactgctgcgtcaggctagcttcgacccgagcgtactggcgattaaaattaacatttaccgcgtggcgaaagatagtcgcatcatcgacagcatgatccacgccgcacataacggtaagaaagtcaccgtggtggttgagttacaggcgcgtttcgacgaagaagccaacattcactgggcgaagcgcctgaccgaagcaggcgtgcacgttatcttctctgcgccggggctgaaaattcacgccaaactgttcctgattagtcgtaaagaaaacggtgaagtggtgcgttatgcacacatcgggaccgggaactttaacgaaaaaaccgcgcgtctttatactgactatagcttgctgaccgccgatgcgcgcatcaccaacgaagtacggcgggtatttaactttattgaaaacccataccgtccggtgacatttgattatttaatggtaagcccgcaaaactcccgccgcctattgtatgaaatggtggaccgcgagatcgccaacgcgcagcaagggctgcccagtggtatcaccctgaagctaaataaccttgtcgataaaggcctggttgatcgtctgtatgcggcctccagctccggcgtaccggttaatctgctggttcgcggaatgtgtagcctgatccccaatctggaaggcattagcgacaacattcgtgccatcagtattgttgaccgttaccttgaacatgaccgggtttatatttttgaaaatggcggcgataaaaaggtctacctttcttccgccgactggatgacgcgcaatattgattatcgtattgaagtggcgacgccgctgctcgatccgcgcctgaagcagcgggtactggacatcatcgacatattgttcagcgatacggtcaaagcacgttatatcgataaagaactcagtaatcgctacgttccccgcggcaatcgccgcaaagtacgggcgcagttggcgatttatgactacatcaaaagtctcgaacaacctgaataaccctatgccaatacacgataaatcccctcgtccgcaggagtttgctgcggtcgatcttggtagtaacagttttcacatggtcatagcccgtgtggtagatggtgccatgcagattattggccgcctgaaacagcgggtgcatctggcggacggcctggggccagataatatgttgagtgaagaggcaatgacgcgcggtttaaactgtctgagcctgtttgccgaacggctacaagggttttctcctgccagcgtctgtatagttggtacccatacgctgcgtcaggcgctgaacgccactgactttctgaaacgcgcggaaaaggtcattccctacccgattgaaattatttccggtaatgaagaagcccgtctgatttttatgggcgtggaacatacccaaccggaaaaaggtcgcaaactggttattgatattggcggcggatctacggaactggtgattggtgaaaatttcgaacctattctcgttgaaagccgccggatgggttgtgtcagctttgcccagctttattttcctggcggggtcatcaataaagagaattttcagcgcgctcgcatggcggcagcacaaaaactggaaactttaacctggcaattccgtattcagggctggaacgttgcaatgggcgcttccggtaccataaaagccgcccatgaagtgttaatggaaatgggcgagaaagacgggataattaccccggaacgtctggaaaaactggtaaaagaagttttacgtcaccgtaatttcgcaagcctgagtttaccgggtctttccgaagagcggaaaacagtcttcgttccgggactggcgattttatgcggtgtgtttgatgctttagccatccgtgaactgcgcctttctgacggggcgttacgcgaaggcgtactgtatgaaatggaaggacgtttccgtcatcaggatgtgcgtagtcgcaccgccagcagcctcgccaaccagtatcacatcgacagcgaacaggcccgacgggtgctggataccactatgcaaatgtacgaacagtggcgggaacagcaaccgaagctggcgcatccgcaactggaggcgctactgcgatgggccgccatgctgcatgaggtcgggttgaatatcaaccacagcggtttgcatcgccactccgcttatattctgcaaaacagtgacttgccgggttttaatcaggaacagcagctgatgatggcgacactggtgcgctatcaccgtaaagcgattaagctcgacgatctaccgcgctttaccttgtttaagaagaaacagttcctgccactgatacagctattgcgccttggcgtattactcaacaatcaacgtcaggcaaccaccacaccgccaacattgacgctgattactgatgacagtcactggacactgcgtttcccgcatgactggtttagtcagaatgcgctggtactgcttgatctggaaaaggagcaagaatactgggaaggcgtggctggctggcggttgaaaattgaagaagaaagtacaccagaaatcgccgcttaatactttgcgggccgacgagaaatgtcggcccgcattattcaggcactttcgcgaatgggttcgatttcattcagcgtatcaattaacggctgcggcttaccaataagataaccctgcatataatcgatccccaaagagagcaccgcctcgcggatctcttcgttttcaacgtactctgccactaccagcattttcttcattcgcgccaggtggcaaatgcttgccactatctgataatccagactattactcacaatattgcggataaaactgccgtcaattttaagcagatcggcattcacatttttaagccgcgcatagctggcgtagccggtgccgaaatcatcaatcgcaatctggcagcctaattcctgaagatgctgcaaggtgatttgcgcctgcttaacattggtcagagcattactttcggtgacttcaaaaataagttgccacgcttcaatctgatatttagccagcaactgactgacttcaacaggaaaacgagcctgacatacgctggttggagacagattaatagcaaaacggtgagcgggcatcttcgctctgttttcagccataaattgcagcgtatgctcaatgacccacatgtcgatactgctgcttaaaccaaattcgtgcgcgaccggcaagaagctatcggggctgatcagttcatcattctcacctttcatgcgcagaagaatttcatggtaaacatcaccacgcataccggtaatcggctgggccatcaggaaaaaatggttgtgttccagcgcctgctgtagtcgattcatcatcgcgactttatctttcaattcgcgttgcaaatacattgccccgcgacgctgcatattttccggggcgttggtcacgatggaaagttcggcgaccgtatttagctctcccagcagcaggtagatatgattcactgggctgcgcacatagcagtaactgacgccaatctgcggttgcatcggcatgccatcccaaaagaaacgaaattgcttgagatggctatccagtgcggtaatgcgctcctggtggctttctgtattcagtcgcagcgcgagatcgttaccgctaagctgataaacatcttcacccggttccagcaagggactcagccagtgagaaagtttttgcttgtattgaatccgcagcatgatgccatagttcttaaccagcatttccatgccagggatgcgtaaataacaaagcgcagaccagggggcatcacgcaacgcgcgattcagggcgcgaacatttggcagatgaaccaccgggtccacatacgcaagccgctgaatgcgtctgactaccgctctctgacgggttgccagtacagccatataattgacaataaaagagaataccagataactggaggaggttatggtcagctgcgtggtatagccaggataaatgggaatgtaattttgatagctgtggatgctgatcatcaacacgaccgcccagagcaggctaatcagcttataaccatagcgcatcgctccccacatcatcaggggcagcaataaactcaaggtataattggtgctaaaaattgtgcttttttcatttaacggcatgcataacagcaacaataaagcacctaatgccagtagccagagcgcgaactcttttttggtgactttggcatcaacctgctgttttaattggctataatagctacgtaaataaaatggatttcgcactacccgaatgatgaagtagcacagcgggacaccgatcagattacccaccagtaaggcctgataattgattaaagtcccgaggttaaaaggcatgacaccgaccagattttctctgctcgccagtaatcctacaaatgcagcaaactggaaaagtatcagaaacagcgttgcaggaaacacaatctgccagaatatacgctgggaaattaaacgggtatcaccatgactaacgttgttacgccggggagtaaagaccctgtaaccgccccaacagagaatgataatgataataaaattagccgttaaacttagcgtttcgtaaaaacccagctctgcatatttgcggacaaaaatccctaaggcgatccctggcaatgccgcccagctgaaaaacatcatcatgctgatcatcagtgccagaggcagataaaagagaaaaacctcaccggaagaaatatgcgcgaaagtattaatgtgggcgaaaatgggcaagattaaagaaggcaggaacagcggaagcccccaccatttatcacgtatttttatataagttgcattcagtttcatagatgctcagcagaatcccccacatcctgaaggaggtgtattcagacaggcatcccacctgacttcgaatgatgattattcatcactatagagagcattgattctaagtgtcatatgaaagtaccaattgatatatatcaaacaaaataaccctgattaatgaattattacgtttatcatgttaattcatcattattacatcatcattgtaaataattaaattaacttccataacattaaaatatgtatccactgacgcttttttacataacgaagaattgaccattttgtcctgttgtgccttaatgtaagtaccgtccacagcgtgggacatacttcaaggaaccttttgtgagtcaggcaaccagtatgcgaaaacgacaccgatttaacagtcgcatgacccgtatcgtactgctcatcagctttatcttcttctttggccgttttatctacagctccgtcggtgcctggcagcaccatcagagcaaaaaagaagctcagcaatccacactctccgtcgaaagtccggtacaacgttaacggttaccttctccactttcacagaacataacggcacttcgctgtcggatgcttttgctgtttgggattatcaaagcggcagatattctttcatcttaaattttacgtctttatcctgactgatgtttatcctgtttggctgcgaaataaatataaaattaatatatatgttgtaatgatatatttttataaattattccctgcgtgaattttaataaatttaatctatccctttatacgcaatacatttactttcctcttttgatgatcttaaatgtcttatttttcgtaatgtgtataacaaggaatagtgatgaaatttaaaaaatgtcttctgcctgtggcaatgttagcgagtttcactctggcaggatgccagagtaatgctgacgatcatgctgccgatgtttatcaaaccgatcaactgaataccaaacaagaaactaaaaccgttaatattatttccattcttcccgcaaaagttgccgtagacaactcccaaaataaacggaacgcacaagccttcggcgcgcttattggcgcagtcgctggcggtgttatcggccacaacgtcgggtctggcagcaattccggaacgacggcaggtgcagttggcggcggagctgtaggcgcggcagcgggttctatggtgaatgataaaaccttagtggaaggtgtttctttaacctataaggaaggcaccaaagtgtatacctctacccaggtgggtaaagagtgccagtttacgacaggtttagccgttgttattaccacgacgtataacgaaacgcgtattcagccaaataccaaatgtcctgaaaagagctaataatcaggaggagtcatgaagaaagtttttctttgcgccatcttagcctccttaagctatccggctatcgccagtagtttgcaggatcaactctctgctgtcgcagaagcggaacagcaaggtaaaaatgaagagcaaaggcagcatgacgaatgggtcgcggagcgcaacagggaaatccagcaagagaagcaacgtcgcgcaaatgcccaggccgccgctaacaaaagagcggcaacggcagcggcaaataagaaagctcgtcaggataaactggacgccgaagcctctgcggacaaaaaacgcgatcaaagttatgaagatgagctacgcagcttagagattcagaaacaaaaactggcgctggcgaaagaagaagcccgcgttaagcgagaaaacgaatttatcgatcaggaactgaagcacaaagctgcgcaaaccgatgtggtgcaatctgaagctgacgccaacagaaatatgactgaaggcggtcgcgatctgatgaaaagcgtgggcaaagcagaagagaacaaaagcgacagctggtttaattaatcgatgttagtaacttcaatcctataattcttgaagataaaaaaccctctgtagtaacagagggttttgttcattcatagtgcagggtcaaatcattcccactcaatggtagctggcggcttgccgctgatgtcatacaccacgcgggaaataccgttcacttcattgataatgcggttggaaacgcgaccgaggaaatcgtacggcagatgcgcccagtgtgcggtcataaagtcgatggtttcgacagcacgcagagagacaacccagtcatacttacgaccatcgcccattacgccaacggaacgtaccggcaggaacacagtgaacgcctggctgactttgtcgtacaggtccgctttacgcagttcttcaatgaagatggcgtcagcacggcgcagcaggtcacagtactctttcttcacttcacccagaacacgaacgccaaggcctggtcccgggaacgggtgacggtacagcatgtcgtacggcaggcccagctccagaccaatcttacgcacttcgtctttgaacagctctttcagcggttcaaccaggcccatcttcatctctttcggcaggccgcccacgttgtggtgagatttgatgacgtgtgctttaccggttgcagacgccgcagattcgataacgtcagggtagatggtgccctgcgccagccacttcacgtcttccagtttcagcgcttcttcatcgaatacttcaacgaaaacgcgaccgatgattttacgttttgcttccggatcgttttcgccagccagcgcactcaggaagcgatcttctgccggtacgtgaacaatgttaagaccaaagtgatcgccaaacatatccagaacctgctctgcttcgttgaggcgcagcaggccgttgtcgacgaatacgcaagtcaggtttttaccgatagcgcggtgcagcagcattgcggttacggaggaatccacaccaccagagaggccgaggatgactttatcgtcgcctacctgctcgcggatgcgagctacagcatcgtcgataattttcgctggcgtccacagggcttcacactggcagatatcacgcacaaaacgctccagcatgcgcataccctggcgggtatgagtcacttccgggtggaactgtacgccatagaagcgtttttcttcgttagccataatggcaaacgggcagctttcggtgctggctacggtgatgaagtcggacggaatagcggtaactttatcgccgtggctcatccagacatcgagcagcggtttaccgtctgcggtcagcgcatcttcgataccgcgaaccagtgcgctgtcgtttacgacttcaacctgcgcgtagccaaattcacgttcgttagaggcttcaacgtgaccgcccaactgcattgccatggtctgcatgccatagcaaacgccgaataccggtacgcctgcttcaaagacatactgcggcgcacgcggactgttttcttcagtagtactttccgggccgccggaaagaataatgccgcttggattgaagtcacgaatttgtgcttctgtcacatcccacgcccacagttcgcagtaaacacccagctcacgcacgcggcgcgcaaccagttgagtgtactgagaaccgaagtccagaatgaggatgcgatgcttatgaatgttttccgtcattgacgcttattccgaggcaagtgaaacagataatataaatcgcccgacatgaagtcgggcgaagagaatcaggagcccagacggtagttcggggactctttagtaatggtcacgtcgtgaacgtggctttcctgaatgcccgcaccgctgatacgtacaaactccgctttagtacgcagttcgtcgatagtaccacagccggtcagacccatacaggagcgcaggccgcccatctgctggtgaatgatctctttcaggcgacctttataggctacgcgaccttcgataccttccggcaccagtttgtcggcagcgttatcgctctggaaataacggtcagaggaacctttggacatcgcgcccagggaacccataccacggtaagatttgtaagaacggccctggtagagttcgatttcacccggagattcttcagtacccgccagcatggaacctaccatcaccgcgcttgcgccagcggcgatagctttggcgatgtcgccggagaagcgaataccgccatcagcgataaccggaataccggtgccttccagggcttctactgcgtcagcaacagcggtaatctgcggaacaccgacgccagtcacgatacgagttgtacagatagagccagggccaatgccgactttaaccgcactgcaaccagcttctgccagagcgcgtgcacctgcagctgttgccacgttgccgccgataatttgcagatccggatatttagcacgggtttcacggatacgttgcagtacaccttcactgtgaccgtgggaggagtcgatcagcagaacgtcaacgcctgcggcaaccagcgcgtcaacacgctcttcgttacccgcacctgcgccaaccgctgcaccaacacgcagacggccttgctcgtctttacaggcgttcggtttacgttccgctttctggaagtctttcacggtgatcatgccgatcaggtggaattcgtcatcaaccaccagcgctttttcaacgcgtttttcgtgcatttttgccagcaccacttcacgggcttcaccttcacgcacggtgaccagacgctctttcggcgtcatgtaaacgctaaccggctggttcaggtcggtaacaaaacgcacgtcacgaccggtgataatacccaccagttcgttttcttcggtaacgaccggatagcccgcaaaaccgttacgctcggtcagttctttcacttcgcgcagcgtcgtggttggcagaacagtctgcggatcagtcaccacaccagattcgtgttttttcacacggcgaacttcttctgcctggcgttcaatggacatgtttttgtggataaagccgataccgccttcctgagccagagcaatagccaggcgcgcttccgttacggtatccattgctgcggaaagcatagggatattcagacgaatagttttcgtcagctgggtgctgaggtcagcagtattcggcagaacggtagagtgagcaggaacgaggagaacgtcgtcaaacgtcagagcttctttagcgatacgtagcatgggcaatatctcgaccagagtggttaataaatattgccgcggcattatacagagcgtaaccgattgcatctacccctttttgcaaaaaatgcttgctatccccgaagggcgggttactatcgactgaataacctgctgatttagaatttgatctcgctcacatgttaccttctcaatcccctgcaatttttaccgttagtcgcctgaatcaaacggttcgtctgctgcttgagcatgagatgggacaggtttggatcagcggcgaaatttctaatttcacgcaaccagcttccggtcactggtactttacactcaaagacgacaccgcccaggtacgctgcgcgatgttccgcaacagcaaccgccgggtgaccttccgcccatagcatgggcaacaagttttagttcgcgccaatattacgctctacgagccgcgcggcgactaccagataatcgttgagagtatgcagccggccggtgaagggctgctgcaacagaagtacgaacagctcaaagcgaagttgcaggctgaaggtttgttcgatcagcaatacaaaaaaccacttccctcccctgcgcattgcgttggtgtgatcaccagtaaaaccggtgctgcgctacatgatattttgcatgtgttaaaacgtcgcgatccttctctgccggtgatcatctaccctgccgccgttcagggcgatgacgcgccggggcaaattgttcgcgccattgaactggcgaatcagcgcaatgagtgcgacgtattgatcgtcgggcgcggcggcggtagcctggaagatttatggagttttaacgacgaacgcgtagcgcgggcgatttttaccagccgcattccggttgtcagcgccgtcgggcatgagacggatgtgaccattgccgattttgttgccgatctgcgtgcgccaacgccgtctgccgccgctgaagtagtgagccgtaatcagcaagagttactgcgccaggtgcaaagcacccgtcaacggctggagatggcgatggattattatctcgccaaccgcacacgtcgctttacgcaaattcatcaccgattacagcaacagcatccgcagctccggctggcacgccagcaaaccatgcttgagcgcctgcaaaagcgaatgagctttgcgctggaaaatcaacttaagcgtaccgggcaacagcagcagcggttaacacagcggctgaatcagcaaaatccacagccgaagattcatcgcgcgcaaacgcgcattcagcaactggaatatcgtttagcagaaaccctgcgcgcacagcttagcgccacgcgtgaacgtttcggtaatgcagtaacgcacctcgaagccgtaagcccactgagtacgctggcgcgtggatacagcgttactactgctactgacggcaatgtactgaaaaaagtgaagcaagttaaagcgggtgaaatgctaaccacacgtctggaagacggctggatagaaagtgaagtaaaaaacatccagccagtaaaaaaaagccgtaaaaaggtgcattaagccagcacgaattcaacgcgttttttgcttatcaagccatgcccgtgctgacagaagtaatctactgcaccacaggcttttaacacctgcaacggttgatggcagtctggacaaagagctttcatttcaataaattccccgcaggatcggcaacgcgcatggccgttatcctgatcaagcacatgctgacattgtggacaatgcagttccatatgaattcctccggtagccattccctctacattcatagagggaatggcagataaaatacttacggataattatttatttttcttgatgtgcttcatcagacgcttacgtttacgcatctgggttggcgtcagggtgttacgcttattcgcatacgggttttccccttctttgaactgaatacgaatcgggcttcccattacgtccaggcttttgcggaagtagttcatcaagtagcgcttgtaggaatcaggcaggtctttcacctgattaccgtgaatcaccacaatcggcgggttataaccaccggcgtgggcatatttcagcttcacacgacgaccgcgtaccagcggcggttggtgatcttcaacagccatcgtcatgatgcgcgtcagcatagaggtccccacacgacgggtggagctgtcatacgcttcacgtacactttcaaacaagttaccaacaccactgccgtgcaaggcagagataaagtgcacacgagcaaaatcgataaagcccagacggaagtccagcgtttctttcacctgctctttcacttcctgactcaggccatcccacttattcaccacaatgacaagactgcgcccactattgagaataaagcccagcaggctgagatcctgatcggaaataccttcgcgcgcatcaatcactaacatcaccacgttggcgtcttcaatggcctgcaacgttttgattacggagaatttctctacagcatcggtgattttgccgcgtttacgtacgccagcggtgtcaatgagcacatactcacgtccatcgcgttccattgggatgtagatgctgtcacgcgtcgtgccaggcatgtcgtaaacaacaacgcgctcttcaccaagaatacggttagtgagtgtagacttacctacgttcggacgacccacaatcgccagtttgatcggcagactttgcgggtcgaagtcgtcttcctcttcttcttcgccgttctcttccgcttcaaattgcgcccagtattcagcgtcttcgtcgacttcctcttgcggtgcgagatcttccatccacggcagcagcacatgctccagcagacttaatacgccacgaccgtgagacgcggcgatcgggtagatttcacctaaaccaaggctgtagaaatcaaccactgcctgatcgggatccagaccgtcagttttgtttgccaccaggaaggtcggtttttcacgggagcgcagatgtttggcaatcgcttcatctgccggcatcaggcccgcgcgcgcatccaccataaacagtacgacgtccgcttcttcaatcgccagcaggctttgttccgccatgcgggtttctacaccgtcttctgtgccatcaatcccgccggtatcaatacagataaactcacggccttcaatttccgcacgaccgtacttacggtcacgagtcagacccgggaaatccgcaaccagcgcatctcgggtgcgagttagacggttaaataacgtggattttcctacgttagggcgcccgacaagcgcgaccacaggtaccatgtttaaagcctcatttttataaatcatcagacaacgcacgctatattcgcgtcgttgttaaaaacaggaaaacggcccctgtccaggagccgttttcaaagtgaacgacagagacgattaacgtgtaatagagtacacggttccgtcttttgcctggatcagcagtttgccgtcagcggcaaccggttcagtctggaaaccggaactatcaactttttgctgggcaacgaaacgaccatcttcgacgttaatccagtgcagataaccttcactgtcaccgaccaccaggttgccattatacagcaccggagaagtcagcaggcgatgcagcagatcgctttgtgtccacagcgtaacgccgccatcaatggtcaacgccatcacccggtcattttgatcgaccagatagatgcgattgccgtcgacgatgaaatcattcacgctacccagttcgcgtttccacataatctgaccactgcgcagatcaagcgccgtcaggttaccattataggccagcgcgaaaacaacgccgttaacaacgacgggagtcgtgtcaacatcgctcagacggtcaatttcggtagaaccggtcgcctgggaaatacgctgctgccaaatcatctggccctgttccatcagcactgcgctgacgcgaccattatcgccccccacgacggccgcaccaaaagccgttgtcggcgcagactcgccacgcaaagagaggctaggcatatcgaggttaactgtccatttgacagcgccgtcagcttcgttcagcgcttgtaactgaccgttactggtgtggattaacaccagaccgtcgctgaccaccgggcggctaagtgcttcacccgcgactttagtttgccatgccacagtaccatcgctggtattcagcgcgtaaacctgcgccttttcgctgccaatgtagacatgcccaccagacacggtcacaccgccagaaagtaatgcaggctctttagagaaccagccatctttctcggccaggctgacagaccagatttctttgccatcatccgcattcagcgcttttactaaaccagcgcggtccgctgcatagacaacgttgtccgccagtgccggatgaagattggaatagaagttgccaatgccgctaccaacggaagtgctccacgccgtggtcggcgtaaactggttttcaacggttggcaatggggacatctttaccacatcttcttcgctgttaaacaggctacagccgcttaaaagggtaacggaaagcagtcctggcagcagtaatttacgcaattgcatcgggtccctctcagatggacaaattattaattttcatctgcatcatttcgctcagtgccggagtaacatcgcttttcacgcctgcttcccatgcactacgcgcaccttgcttatcacctttgctcagcaatgcttcaccacgcaggtcggcaacaatggcagcccacccttcacctttgatggtatcaagggttttcagcgcggcatcagcctgcttgagctgtacctgaacgcgagcaagacgcagatttatcacggctttgagattttcatcgctcgtgtctgccagcccctgttgtaactgggcggcagctttctctagttcatttttgtcaacaaattgctgcgcaagttccaaagaagccagcgcaccataagtatttttattttcagcagcaaatttttccgccgccgggatgctatccggtttgccttcgctcactgcggtaaccgcattttgataggcaagagaagcggagcgtgcagaatcaacctgatggctgttccagtagcgccagccaatcagtgcgccaacgcccaaaatcaccccaacagccagtgctttgccattttcagcaaaaaagcgtttaaccgcttctacctggtcgttttcgttctcgtaaatttccacgctgtccttctccttccttaacccagtaacgtgcgcaaatgcgcggctacgctatcctgcgcaactgccgtttgctcaccagagcgcaaatccttcactactgctgtgccgttagccacttcagactcacccagcaccacagcaacgcgggcaccccatttatcagcacgggcaaactgtttcttaaagttgccgccgccgtggttggtcatcaatttcacgcccggtaattcatcacgcagacgctcagctaatgccatagccgcagattgtgtatcagcaccactagccaccaggtatatatcgacaacaggatcggctttaaattccggattaacggcctgtactaacaatacaagacgttcgaggcccatagcaaaaccgacagccggtgttgcacgaccgcccagttgttccacaagaccgtcataacgaccgcctgcacacacggtgccctgggagccgagactgttagtcacccactcgaaaacggtacggttgtagtaatccagaccacgcaccagacgctggtttacggtgtaagcgatccccgcgctctccagcagtttgcacagaccggcaaaatgctcacgagattcctcgtccagatagtcacctaatgccggagcgtcgttgagaagcgcctgcacttccggatttttactatccagcacgcgcagcgggttagtgtacatgcggcgtttgcagtcttcgtccagcttttctttatgctgctcaaggaatgccaccagcgcatcgcggtaattggcgcgtgcttccaggctaccgatagagttcagctcaagagttacgtgctcggaaatacccagcgcgcgccaccagcgggcagtgagcataatcagttcagcgtcgatatccggaccttgcagaccgaaaacttcgcagcccaactgatggaactgacgataacgccctttctgcggacgctcgtgacggaacatcggcccgatataccacagacgctgttcctgattgtacagaagaccatgctcgatgccggcgcgtacacagcccgccgtcccttcagggcgcagagtcaggctgtcgccattgcgatcctcaaaggtgtacatctctttttcaaccacgtcggtgacttcaccaatcgcacgtttgaatagcggggtctgctctacaatcggcaagcggatttcactgtaaccgtagctgccgagcacgtttttcagtgtgccttcaatgcgctgccagatggccgtttcgccaggcaggtaatcgttcatgccgcgaatggcttgaatgttttttgccacgtttattctctttctgaatataaaaatgaaccctcaacgcttccctcaatgtttcgggagccatgcgggttcaatcatacacgggaagcgaggcgcttcccatcacgttattatttttcaacctgctgaacgtcaattcgacgcgcttcgtccagctgactggctttcgcacgaatgcgtgcttccagctggtcgatcatatcgttgttgtccagacggtctttgcgcacgccatcttcatagaggccgcttttcttgttgccgccggtgacgccgagtgtagaaaccagcgcctcacctgggccattcaccacgcagccgataatgctaacgtccatcggagtgatgatatcttccaggcgttgctccagcgcgttaaccgtaccgataacatcaaattcctgacggctacaggtcgggcaggcgatgaagttgatccctcggctacggatacgcaggcttttcaaaatatcgaaaccgactttgatctcttcgaccggatcggccgccaggcttacgcgcagcgtgtcgccgatgccttcagacagcagcagacctaaaccaatggcggattttactgccccgctgcgcgcaccaccggcttcggtgatccccagatgcaacggctgatcgatctgttttgccagcaaacgataagactcaacagcgaggaagacgtcagacgctttcacgctgactttgaactgatcgaagttcaggcgatcgagatgatcaacatgacgcatggcagattccagcaacgcctgcggcgtcggttcgccatacttttcttgcagatctttttccaggcttccggcgttaacgccaatacggatcggaatgtttttatcgcgcgcacagtcaaccaccatgcgaatacgctcttcattaccgatattgccagggttaatacgcagacaatcgacgccgtattccgctactttcagcgcaatgcgatagtcgaagtggatgtcagccaccagcggcacgttaacctgctgtttgatgagtttgaacgcttctgccgcgtccatcgtcggtacggatacacggacgatatcagcgccaacgcgttccagcgccttgatttgattgaccgttgcttcgacgtctgtcgtacgcgtattggtcatggactgtacggcgatgggagcaccatcgccaatcggcacattcccaacgtaaatacgtgtactttttctacgttgaattggagcctggttatgcatgaaaaatctcccgcgttacccgtctgttactgcgccggactttgttcggcattgagggtcagacgcgcaacctggttagttctgataaaacgactcagatcgacaggtttcccttgatactggatctgtactgcggctggcgcaccaattttcagtttgtacggtgcctggccggttaagttcaaattaccgtctttacgctgcataccgctaaacaattttttaccggtagcatcagtgacctccagccagcaatcggcagtaaagttcatcaccagcgcattcggatcagccaccggcgtggtcacgccagcctgatcggttggcaacggcgcagcaccatctggcgttgttgctgccgttggtgccggggtcgcggcggtatcaacatttgcctggctagggctaacaaccgcattctgttgcggatcaacagctggtgctggcgcagttacggcaggtgtttgcgtgttggttgcggtagtatccacagacgctggcggcgtggacgttgtagccgggtctgtagttgtgctcgtatttaatggaacactctgcccctgctcgctattactgctcagttccgcgctagattgatcggccatagtggtgatctcttcctgctgagctttgcggtcttgccaccaccaggcaccgctcaggccgataaccacaaacaacaccagccaagtgaaggtcatcagccagccgtcgcgttttttgcggcgtttaccgagggaaaaactctgcatcggcgcaacttttgcagcccgaagtggagcctgcttttccagccctggcagcagttcttcttctggaatatgtaccagacgcgcataagagcggatatatccgcgcaggaatgtactagcaagatcggcgggtgccttatcttcttcaatgtcgcgtaccgtggaaaccttcaggcaaagtcgctcggcaacggcctgctgactaagtcctagttgttcgcgagcattacgcaggcgagcgccggtagtaagtgcttcattttggtcgtgcgtggcttcagtattcattcgctgcaggtacgtttaaatgagaattgagatgccggtgaaccatcatgctcacccacaccgcgaaacatccgttaagttaaccgttatcatacagtataagaccgtctgtgtgctcgtgacaaagcccacattcactaaggctaacttactgttgcatcgttacatactgccttaaagtcagcaaaaacgcaccgttaatattgaccagacaattgcaacttaatacttcattcataaaacattacgccacggtacataaagtaaccgtggcgtaatggctatcagaccgctttaatgtcgatggcttcaccctgcatccgtttacgcagggtacgtttcgtacggtcgataacatcgcccgccaactgaccacaggcagcatcgatatcatcaccacgagttttacgcacaatagtggtgaaaccgtagctcatcagcactttactgaaacggtcgatacggctgttgctgctgcgtccatacggcgcacccgggaacgggttccacgggatcaggttgatcttacacggcgtatctttcagcagttccgccagttggtgcgcgtgttcagtgccgtcgttaacgtggtcaagcatcacgtattcaatagtgactcggccctgattggcgttggatttctccagataacggcgcaccgcagcaaggaacgtttcgatattgtactttttgttgatcggcacaatttcgtcacgaatttcgtcgttcggcgcgtgcagggaaattgccagtgcaacgtcgatcatatcgcccagtttatccagcgccggaactacaccggaagtggaaagcgtgacgcgacgtttagacaggccaaaaccgaaatcatcaagcatgatttccatcgccggaacgacgttgttcaggttgagcagcggctcgcccatgcccatcatcactacgttagtgatcggacgctgaccggtgacttttgctgcgccgacgattttcgccgcacgccacacctggccgataatttcgctcacccgcaggttgcggttaaagccctgctgggcggtggaacagaatttacactccagcgcacaccccacctggctagagacgcagagcgtggcacggtcgtcttccgggatatacaccgtttcgacgcgctgatcgccaacggcgatcgcccatttaatggtgccgtcagaactacgctgttcttcaaccacttccggtgcgcggatttccgccacctctttcagtttgccgcgcaacactttgttgatgtcggtcatctcatcaaagttgtcgcagcaatagtgatacatccacttcatcacctgatcggcgcggaagggtttttcacctaaatctttaaaaaactcccgcatctgctgacggttgagatccagcaggttgatttttccatctttcgtggtgacgttttcaggtgtgactaattgttcagacatatgctattccggcctcgttattacacgttatggcccctggagggttgaaaaaagaaacgccccggtgagcggctgctcgtccgggggcgctgcattgtacaaattctggcgcacggatgccacgtttgcacgcggcatttacgaaattattaacgggtgcgcgggcacacttcgccttcgccaaagaaataagcgatttcgcgagcggcagattcgacggaatcagaaccgtgggtaccgttttcggtcaggctgtcagcgtaatcagcgcgcagagtaccagccagtgcgtttgccggattggtcgcgcccagcagatcgcggtgacgctgaacggcgttttcaccttccagcacggaaaccacgatcgggccagaggtcatgaattcaaccagaccatcaaagaacggttttccatcgtgttcagcataaaagccacgtgcctgttcaacggtcaggtgcagcattttggtgccaacaattttgaaccctgcagcttcaaagcgcgcaaagatattaccaatgacgttttttgctaccgcgttcggtttgatgatggaaaaagtacgttcaatagccatttttacctctgtaaattgttctgttgttgtctgtaccagcgtacgagatggcgcggattataatgagcaacagggccgttgactattgatgaaggtaacatttttttaaaataaaatgagttttagcaacaatcagggacaaaacagattattgcatgacaaatttcactgtcgcgatttgccccacgtcatccatcaccagcaattgataatcacctttatccgtcaaatgcagggtcacgttgcgcccgcgttcagttaacggttcgccattcagaaaccaccagcgttcacctgcccctccactactttgcaacggcaaagtcgcttccgctgcgcccggtaaacgtttaataatcgcgccatcgcgaacgcctgtcagctgcagcgggagctgggcatcgtgaccgtatggcgggcaacttgtgctggccggtggtaagcgcacagcgcgacgttcacttgcgggcagccagggttccagcggtagcggccagacatttatcatttcttgtcgcgcttgcgggcaatcagcggcaacacgtttgccattttcatccagccagatggggaaacgaatgccattaatgccttcctgctccggcagtaatagagttggcggctgactcccgtccagcagccaggttgccaggcggcggcgacagttaccgtcaccttccggcaaagactgtccgcccggccagcagataacgccacgagtgacactgttcgggcgcgggtcttccggcagattcgcactgcggctcagtaagatattattgacctgattcaacaatggtacggcactggcaaagccaaactgaccaacaacgggcgtgccgtccggtctgccagtccagatcccaatgacatagcgagcgttaaccccaatcgcccaggcgtcacgatagccatagctggtgcccgttttccatgccagtggggcgacgcgcggcaaggcactatccggcaagggttgcgcttcatcagccataatccggcgaatgatccacgccgccccgctgctcattaaaggccgttcaagcagcggatcgtcaggctgtaagcgcaatttgcctgccttgccgtggcgagcaaacgcggtatacgctgccgccatatcttccagttttgcaccagcgccgccgagaatgagactaagattcggcgcagcaccgttgggcaaatataacggcaatccaacattgcgtaactttgccgcaaaccgtttcggtccataggcttccagcacctgcacagcaggtaagttcaggctgcgcaccagcgcctcgctcatgctgatcgggccatgaaaaccgctatcaaagttacctggtcgataatcaccggtgcgccgggggacgtcttgcagcagacttgccgggtggatcaagccttcatccagcgccagaccataaacaaacggtttgagcacacttcctgggcttcggatgctattgaccatatcaacatgaccaaagcgactatcatcgttgagatcaacgcttcccacccagccgcgaacacgcatatcggtatgatcaaccacgatcatcgccagactgctgcgcggtggcaaccgccctttccagttttgcgccagttcttccagacgtcgttgaagaccggcatccaacgtagtagtgattttgtcgcttttgcttttaccgagcatcatgcggctaaacagcggtgccagttgcggcatttgtcggggggccagccagatgggttcttccctactctcttttacctgctcacgggaccacacaccttgcacggccatccgttcgagcactttattacgcgcggcttcggcacgctccggccaacgatccgggcgaagacggctgggcgcttgcggcaaaaccgccagcattgccgcctcggaatagcttaaattcgcagggctttttccgagataagcccaacttgccgcaccgatcccctgcaacgtaccgccaaacggagcgcggttaagatacaaggtcagaatttcacgcttagacagatgccattccagttgcaacgcgcgccagagctggcgaattttgccgccaaatgttttggggtgaggatcaagcagacgagcaacctgcatagtgagcgtgctgccaccggaaataacccgtccgctagtgagatcttgccatgctgcgcgcgccacgctgaatggattcacccccggatgcttccagaaccagcgatcttcataattgatcagcgcttcaaggtaacgtggagaaacatcttcgattgttaccggataacgccagatgccgtcagcatcggcgaagcgccagagcggcgtaccatcctgcgccacgaccactcgtgcgggattgacttcatgcagcggtagaggccagagtttatctgctccccacgctgcaagaaaaaggagaaagggcgcggctgccaacgttatccagcagccgcgtttggttaacaagcgaggcatttacggtctgacaatcagcagatcttcagccgcgccggtcgcccgccattggggaacatacatactttccaccatcggttgcggtacctgatacgttcccggcgtcaccgcccgcgccagatacaccagcgttaccggttggtattcatcaacggcaaccgccgccacaaagcgatcgtcacggaactcaatgtgcttaatgctcgcctgctgcatctggttcagtaagttctgcacttcgccaccactttgctccaggctggcgctaccgttcgccagattctggttttccagttccagacccgcaggcagcagatccacgactaacgcatccggcacgctgttactggcttttacctgcaaccacaccagcaccagatcgccgctacgtaagctgtccaggcttttgctcttaccatcagtaccaagaatatgacgctcgatttgcagcacattgttcgccggtaaaggtgcggattgcggataaccgctggcatccatacgcaaccataacggctgatcgccactgttgctcacctgcaaggtgacaagttgatcgctattcagattgctgttttgcgctttctcgcctgtcagctgctcagcactgaaagaggtttgcgcctgccatttaccgggtaaatcctgaatcgtacgggcagccaggaacaacgcgttactttcctgcgtgcttagccagcgttcaccaaacgcctgctggctaagtgtgttcagcaaagtgtactgctcatcgggtagcagtttattttcttccagcaaggagagcattaacgcgttgtcgcgcagactactaccgtaatcacccagccatatccgctcatcactattacgcggcgttttcagcgccagcgcaatcgcttcttcaccacgcgtcgcatcacccatggttttcagcgcaacgccaagttgcagcagcggtaaaccagaagcggcatctgcacgatgctcccagatttcacgcagcgcacccagcggagccttttgctgacgggccaacaccagcgcagcgtaagactgtacggcgaatttactggctttgagattatccgcgtacgggatgctcatcatgcccggatcttgtaaatagcgcagcagacgctcattaccccggttaatggcgtctgtcggcacgctgtaaccctgttcgcctgcgcggaccaggaaatccatcacgtaagccgtcagccagtactcttcgtcaccgtttttatcccacagcgcaaagccgccgttatcacgttgcatttgcagcaaacgggaaatgccgatatcgacgcttgcacggcgtttctcatcactgtcgcctttgatgcccaacgcctgcagttgggctgcgttggtataaagactcggaaacaggccgctggcggtttgctcaagacagccgtacggatacgcttttaactctttgatataacgtgcgatgttcagcggtggtttgccgctcaacaacaattgcccttccagcgtaacagggctgaagttttgcaatccatccgccggaatcgcccatgtctcaccaggctgtaacgccgtaccgtaattaaccgtttgtgccgggaacgccggacggacgccgattttccactgcttatgctgatcggcaacggtttcacccggtaacgctaacccgctaatggtggcctgaatttctccatcgccataacccggcaatgctcgcaccgggataaacagcgtagtacgcacacctggcgctaattcaacggctgcgggactatcgctgaccagttcaagcaaaccactggcggtcagggcaacgttcagtttttgcggtttatcggtaagattagtgatatccagcgtcagacggctggtatcgccactcgccataaagcgcggcatgttcagttcagcaatcaccggtgcggcaactatcactttactttcgttgctaccgaagtcatctgccgtccaggcttgcgccatgacgcgcaattcaccgttaaaatcgccaatcggcagtgtaacgctgccttcgccctgttcgttgagcgttaccggcagcgcctgctgcacgacaatattgacgtgattgaccggcggtttaccaccacgtttcagctcatcaccatcgccaccgaaacgcagagctgccagacgcccctgaccttcaataacctgaccgtaaatatcgtaaatgtctgcgccatagcgtttctgaccaaagaacgcctgccacggatctggcgtgacgtagtcagtaatattcagcacaccactatcaacggcagacaccagcacattcacctgtttaggcttctcgccatttttagtgctggctttaattttcacggttaatggttgattgggacgcatttttgctggtgtttccagcgccagatcgaggcgacggttttcatcgccaagcggcagatgcaacacaccaaccgcgcgttttggcgtcgcggagcgagatttatcgccaggacgtaccaccagcgtacttaaatacagatcatgacgattccaggttttatcgaccggaatcgtcagatccagcccttgagcccgaacatcaatctcttgccaccacagcggcccttcactggactcgaccatcgcataacctttacccgccgttggcgcggcgatatgcaacttaatggtgtcgccagggcgataactggctttatccagtttcagcgtgacacggtcgggtcgcactgcgccgctaccgtcgctgttgtcctgccagctatagccagcccagaaacgaacactactgaccgcttcattcggcgctttgacttccagacgataagcgccccactctaccggaaaactgaccttgccggtttcgtccgctttcagatccagagtttgttcattttcgatcagatctttttgatcaaactgactctgccagccttcatcttcactccagttccagtagtaatcgcggcgttcgcgaatcaggcgcacctgcaagccgctcacggcttttttcacgccttgcgcatcgctataaacgatgtcaaaagcggcgttactgccttcatcaacaatgggctgtttcaccgtgctgtcagtacgataatcgtaaacgcttttgctggcgaactgcggacggatccccggcaatgcatcggcaggccagatagcctgctcagcgcggcgcgtcaccgggcgaccgccgctttccagcaaactaccctggaaaataacctgtaatggggaatgcgtttccttccactggctttctgtagaaacttcgccgcgccctttatcatccagcgtcaactgaacttcatccagcgtgcgggaaagattttcggcagctatatcgccgaattcaaaaccaggtaaggcactcacagcttcacgcagtgggcgcaggaaaagttgcccttgcaaagtattaccattagcaggtgcaccatacaggtagtaccccaccacggagaatttcacttcatctttcggcgttagcggggttttctcaccggtcagattcagcgccatgcgctctggcataaaatcttcgacgtggaaatcccacatccgatactgattatcgcccgtgttagcgcgaatatgccacataccggttgccgcattgctatcgagtggccaggtaaagtggtagaggccattctccggctgactaacgacgctcctgagtacctgcccatcgggtttaatcacgtctaacttgatgggttgattgggcaacgctttaccgtctgcatcacgcagcaaaccattgaggattaccgtttcacctgggcgataaagatcgcgtgggccaaacatgaaaaactgtttgctatagcctggcgcgccagcaatgttaaattctgctaagtccagcgccggaagttttaaatcgagtagcgttgtctgaccgtctttacgcgccaacagtaatgccgcgtttttatcattttccagctgcacatgcccctgagcgtcactggttgcctgagtcagagtctgccctttctcatttaataaagagacttcaattccttgctgggccgcgccgttttccagactttgggtaaagatatccagacgattgtgataacggtgagcactaacgccgatatcacttaacgtaaacagcgtcgcgggattactgtaatcgtaacgtccagcctgattcatcacagccagatacacgcccgcctgctgaagcggtttgatatcgcccagcggcagcaataatttttcacgggtgttacgcgcaggattgagatcaaaccgtccggtgtagaccagatccgccatctgcagcagtttgtcactctgccagttcgccaggctattgcggtattcccattggctaatgaatgctggcagagattctggcttaacgcggaagaagttaacatcgacattattaacgttgagcgccattaccggcagcccttcaacgactttgccaggcagcaggctaccacggctggcaaaaccgacgctgggttggatgtcgcgggtagttatagttttttcgtaatctttactgaaggttgcgttgttgagtgctttgacctccttgccaatagtaacgatcaaatcacgtttcggttcgaggtggcgtaaacgtaactctttaagattatcactcagctcccaggcaccatccactttgccgcttttttttatcgacgacatgaataacgcgactgaaatcctgatccgggtcgagagggatggagaacgtcagcaccagcgtggctgcaccatcaagttggacttcagagagatccagcaatgtcagcaccttaccggcactctgttgggccagtttttgtctctccggcacggagagttttgcactactcgcgttttcactagaggccgctttagtaacttcagaaggcgcatcttttttcaccgctgttggcgcgttatcgttgttgtcgcaccctgccagcgccagcattagcatgcaggcggctacgcgtaactttttcatttttcatccctgccacaatggcccgttagcaacgtcgaataattattatgcgtgagaatttacgttatgtaattcagtatcacgcccatacaatccgaattttagtgagaattgtggctcagacagccaaatcagcctcttttgcttgtcgcttttcactaaacatccgacaatttagcctaaccccggcaaaaatggagatgcctatgtccacgacatggtttgtaggagccgactggctcgccgaacatattgatgacccggaaattcagattatcgatgcccgcatggcgagccctggacaggaggatcgtaacgttgctcaggagtatctgaatggacatattcccggcgcagtgttttttgatatcgaagcgctttctgatcacacttccccgcttccgcacatgctgccgcgcccggaaacgttcgccgtggcgatgcgtgaattaggcgttaaccaggataagcacctgattgtctatgacgaaggtaatcttttcagtgccccacgagcatggtggatgctgcgcacctttggtgtagagaaagtgagcattctggggggtggacttgcaggctggcagcgcgatgatctgctgttagaagaaggtgcagtagagctgccggaaggagagtttaacgccgcgtttaatcctgaagccgtggtgaaagtaaccgatgtattattggcaagccatgaaaatacggcgcaaattattgatgcccgcccggctgcacgttttaacgcagaagttgatgaacctcgcccaggtttacgtcgcggacatattcccggagcactgaatgttccgtggacggaactggtgcgcgaaggcgaactaaaaacgaccgatgaactggatgcgatattttttggtcgcggcgtcagctacgacaaaccaattatcgtcagctgcggctctggtgtaacggcagccgtggttttgttagcactcgcgacgctggatgtgccaaacgtgaaactgtacgacggcgcatggagtgaatggggcgcgcgggcagatttaccggttgagccagtgaaataagtattttacaggcaataaaaaaccgccgaatttggcggttttttattgctagtctggttcgcggcctttccagcaggttgacttgtgttacatgagcaacgcaggtgcttcacagcaaaacaatactcaccagtaactctctttttgtcaagcaaaagagagtaattattgtttatttagcgtattatcgacaccggccctttccgccgtgttcggtaataaaataacctggcttattagtccgaattcagacaaatataaataaatcctgctcaaaattaaaaattctaaccggtaaaagatattacttaaacatgtaaattcactttcctttaaaaaacaaaaaaccgccaaaatcaggcggttttttgttgctggtccggttcgcggcctttccagcaggttgtattaccgtagtaatgcaagcgcgtctcagcggagacaatactcgccagtaactctctttttgtcaagcaaaagagagttattattgttctgttagtgtattatccactgcggccctttccgccgtctcgcaaacgggcgctggctttaggaaaggatgttccgtggccgtaaatgcaggtgtttcacagcgcttgctatcgcggcaatatcgccagtggtgctgtcgtgatgcggtcttcgcatggaccgcacaatgaagatacggtgcttttgtatcgtacttattgtttctggtgcgctgttaaccgaggtaaataataaccggagtctctccggcgacaatttactggtggttaacaaccttcagagcagcaagtaagcccgaatgccgccctttgggcggcatattttagattatccgattctgtttaaagtcacgcaaaaaaccaccccagcgacgttcatagaatggcgcaatatgttcggtaataaagtggctaattcctttttccccttttttcacctgacaaatatcgattggttcatcgccaggtaatgtatcggtcgctacacttcccgtcgcctgaataatttcttcgatatcaccatcggcttcaatgccaataagtaaattaggctgtgcctcttcgttctctttaatactacaaataaaagcacgcttcaccggcttaatggttttaaataaggtggtgagactatcaatcatttgtgctggcggctctgcgacttcgcttaatatcaggctttcaccgccttccaggatttcctggctgctcagcggatttccctcttcaccaatcaacaaactgatttcacgcggcataaattctttaccggttggcagtttggcattaaggaagagcgtttcgccaagtgtcatctcaaacagcgtgcgaacgggcattacgacaaatgcctgttcgtcttcaaccgcctgttgaagtgcttctaagctggtgaaaaaaggaatgacgctggtgccgtcttctttttcccagtgctgtaaatcaagcgcgctatcttcaaccacagcctcgccctgcgccgccgtaccaggcacccagacggtggattccagtagagtacggaaaaaggccgggcggtgcgccggttcagttgctgctttttccagcaggtcttcaagttcgttttttgtttcggacataagaaccacaattcattcaacgttcggggcgcaaatgcctgatgcgctacgcttatcaggcctacaagggattcgcaatttgttgaatttgcagaatttgtaggccggataaggcgtttacgccgcatccggcatattagtttacgccgttaacagattagctatcgtgcgcacaccaagtcccgtagcgcccgcagaccactgttcaaccggcgctttacggtaagtcgcgctgcagtcgatatgcagccagccttgctgatagttctcaacaaagtggctcaggaagcccgccgccgtgctcgcgcctgccggatacgccgcgcttccggtattgttcagttcggcaaagttagacggcagctggctgcggtggaactccgccagcggcagacgccagaacggttcgttctcctgcgcggcactcgccagcaagcgaccggccagcgcatcgtcaaaactgaacagcgcgtgataatcattacccagcgcagttttcgccgccccggtgagggtcgccgcatcaatgatcatttccggtttctgcgcactggcatcaatcagaccatcggcaagcaccagacgcccttcggcatcagtgttcatcacttcaacttttttaccgttgcgataggtgatgatatcgcccagcttgaacgcattgccgctaatcaggttatccgcacagcagaggaacagcttcacgcgcttgttcagtccgcgcgtaatggcaaatgccagcgccccggtaaccgttgccgcgccgcccatgtcgctcttcatgctgtccataaacgcagtctgtttgatgctgtagccgccggagtcaaaagtgatacctttacctaccaggcacgcgtacactggcgcttctttatcgccagttgggttgtaatccagcgccagcaataccggagaacgttcactaccgcgtccgactgtgtgcagccccatataaccttgctcacgcagatcttcgcctttggtgatccgataagtcacacgatcgcccgcgacgttgctgatcagatcaacagcacgctgtgccagttggcttggtcccaattcttctgccggtgcgttgatggtgtcacgcacccagtcgatgatcatcaggcggttatccagttcctggcgctgggcatcgtccagatccggccacaccactttacgcgtgcctttcggggctttgtaaccttgccagaatgcccagcagcgatccgcatcccagccttcaccgcttaactgaacatgcttgatgcccagaccgtcaatcttgcgcgccgcacgctggatcagccccagatcgtctgccccgttcaaatgcagggtaatgccgtcattattaatgctgtaagttgctttttctccccagcgcgcgtcggcaggttgggtagagagggtaatcttcatcgcttctgtcattttagttatccttctttgtaaaagggccgccagttggcagccccaggatttttccgctaaatgattcgcgttgcaggaaggcggcaagtgagtgaagccccaggagcatagataactatgtgactggggtgaacgagcgcagccaacgcatctgcggcgtgaagcatgacgcggaaattattcggcctcgtccagccagactaacaaaatcgcttcgaggattttctcgttggatgcctgcgggtcgtcgtcgaaatcttccagatcgcaaatccactgatgcatatcggtgaatcgaaccgttttcggatcaagatcgggatacgcatcgtacagtgcttcgccaatttcgcggctatcggtccacttaagtcccatactaacctctgttaatgctcacgcgcatggttgatagtgtaacgcgggatttcgactactaaatcttcgtcggtaacgcgcgcctggcagcttaaacggctttccggctccagtccccaggctttgtccagcatgtcgtcttcctgctcactgctttccggcagactgtcaaaaccttcacgaacgatgcagtggcaggtggtgcaagcacaggatttttcacaggcgtgttcaatctcgataccgttacgcagagctgcgtcgagaatggtttcaccgctattagcttccagaacagcgccatcagggcagagatcctgatgaggcaaaataacaatctttggcatattaaacctcgtccacggaatggcctttcagcgcacgacgaacgctctggtccatgcggcgagcggcgaaatcctgggtttgtttgtctacgtttttaatcgcttgttcgatggcgtcaacatcatcgccctgcgccacttcactcaggtgagcggcagcatcgtcaatgacctgacgttctgcggcgcttaacagcgcggcatcagcagccagcgcgccgtgcagactttccagcacacgcgccgcttctactttttgttctgccagcattcgggcttttacgtcctgctcggcatagctcatactgtctttgatcatgctagcgatttcgctatcggtcagaccgtaagacggtttgacctgaatagacgcctcaacgccggtggatttctccatcgccgtcacgctcaaaagaccgtcggcatcgacctggaacgtcacgcgaatatgcgcaccgccagccggtagcgccggaataccacgcagcgcaaaacgcgccagactgcggcagtcctgcaccagttcgcgctcaccctgcattacatggatagacatcgccgtctgaccatctttaaaggtggtgaaatcctgagcgcgggccaccggaatagtggtattacgcggaatcactttctccaccaggccgcccatcgtttcgaggcccaggctcagtgggatcacatcaagcaacagcatttcgctgtctggcttgttacccaccagaatatccgcctgaatcgccgcgccaatagcgacgactttatccgggtcgatggaagtcagcggtggacgaccgaaaaattcgcctacccgttcacgcaccagcggcacgcgagtagaaccgcccaccatcaccacttccagcacttcatcagcttctacacccgcgtctttcagcgcgcgacgacaagccagtaaggttcgttttaccagtggcgcgatcagttcattgaattgttcacggctgatttcgccctgccagcccgcaacgttaacggtcacggagtccgcatcgctcagcgcgattttggctgcaatggcggcatccagcagttcacgctgaacgcggttatcgctacgatcaggaatgcccgcctgctcgcgaatgtaatccgccagcagatggtcgaaatcatcgccgccgagcgcggaatcaccgccggttgccagcacttcaaacacgccgcgacttaagcgcagaatggaaatatcaaacgtcccgccaccgaggtcataaacggcgatcacgccttcctgaccggaatccagcccgtaggcgatagccgcagcggtcggttcgttaagtaagcgcaggacgtgaaggcccgccagacgcgccgcgtctttggtgccctgacgctgggcatcgtcaaagtacgccggaacggtgataactacaccatccagctcgcctgccagggcttcagttgcccgcgccgccagtgctttgaggatgtccgcagaaacgcgcaccgggttcagcagccccgccgccgtttcaatcatcggcaggccgttttcgctggcctggaattgataaggcagatgcggatagcgttgctggatatcagccaggctgcgtcccatcaggcgtttaacagaactaattgtgttggcggtatcgagcgctgcattagtacgcgcgtcataacccacgctatgcccttgctgttgatagtgaacaacagatggcagcaggtgacggccttcatgatcggctaacgtttcggcctgaccgctgcgcactgtcgccaccaggctgttggttgtgcccaggtcaataccggccgccagacgacgctgatgcggcgcagcactcaaaccaggttcactaatttgtaataaggccatgtttagcttccagaaattaaaaatcgagcagtttttcttcgagttgttcggcactgcttcgcagtttatcgagaaaacgcagcttacgcacggtatccgccgccgcgtcccacgtctcgttgtctaactgttcaaccatcaactgatggcgggtatcaaacatctttttcacacgtttgataaagctttccagccgcgcttcatctttcgcctgttcgatctcgtccagctcttcgcgcagctccaactgttccatcaggaacgcggtgtcgcgcacagtatgctgctcgctggcgagatcaaagccgtgcaaagaaagcaaatattccgcgcgcattaacggatgacgcagcgtttgccaggcctggttaatggttgcagattgctgtacggcggcgagttgttccgcctggcttccgctggcgaatttatcaggatgatactgacgttgtagatcctgaaaacgcaggctcagcgcctgggtatcgagttgatagcgggcaggcaagccaaagagggtgaagtaatccataacattctcagggctgcgatccgccgcgataacggcgaatcaggtaaaacaaaccccacgcgcaggcgaccacggtggggttatcggtatgcgcatcaaacgtggaagctttcgccgcaaccacactcatctttgacgttcgggttggtgaatttaaacccttcgttcaggccttcttttacgaagtccagctgcgtaccgtccagaaattgcaggctcttgccatcgaccacgactttcacgcctttgtcttcaaacacgatgtcttccggcgtcggttcgtcaacaaattccagtacataagccataccactacacccggaggttctcacgcccagacgcaggccaaaccctttaccgcggttagccagaaaggtatttactcgcgctgctgcactgtcgctcagtgtaatgctcataaccaaacctcaactcttattttgcttcacgtttgcttttatagtccgcaatggcggctttgatcgcgtcttctgccagaatagaacagtgaattttcaccggcggcagttcaagttcttcagcaatatcggtgtttttgatcgcctgcgcttcgtcgagagacttccctttcacccattcggtgaccagggagctggaagcgatagcggaaccgcagccgtaagttttaaaacgcgcgtcttcaatgataccttcatcgttgactttaatctgcaacttcatcacgtcgccacaggccggtgcccccaccatgccgctgccgacgttctcgtcgttgttgtcaaaggaacccacgttacgcggattctcgtaatggtcgataactttttcgctgtaagccattataaattctcctgattccgataccgattaatgatgagcccattcgatgctgttcagatccacgccctgcttgtacatttcccacagcggagaaaggtcacgcagacgaccgatggatttacgaactaactcgatggtgtagtcgatctcttcttcagtagtaaaacgacctaaagagaaacggatagagctatgtgccagctcgtcgttcagccccagcgcgcgcagcacgtaggacggttcgaggcttgcactcgtacaggcggaaccactagaaactgcgaggtctttcagcgccataatcaggctctcaccttcaacgtagttgaagctgacgttgagaatgttcggcgcaccgtgttccaggtcaccgttcaggtaaacttcttcgatatctttgatgccgttccacagacggttacgcaggccgcgcagacgttccatctcggtcgccatctcttcttttgcgatgcgataggcctcgcccattccgacgatctggtgaacaggcagagtgccggaacgcataccgcgctcgtgaccgccgccgtgcatttgcgcttcgatgcgtacgcgcggtttacgacgtacatacagcgcaccgatacctttcgggccatagattttgtgaccggagaaagacatcaggtcaactttcaactggctcaggtcgataggcagtttacccacgctctgggttgcatcaacgtgatagataatgccacgagcacggcacatttcgccgatagccgcgatatcctgcaccacgccgatttcgttatttacgtgcatgatggacacgaggatggtgtcgtcacgcatcgctgcttcaagttctttcaggtcgataatgccgttacgctgcggtgccaggtaggtgacttcaaaaccttcgcgctccagctgacggcaggtatccagtaccgctttgtgttcggttttgctggtgatgatgtgcttgccttttttctgataaaagttggctgcacctttgatcgccaggttgtcagattcggttgcaccagaggtaaagacgatttcacgcggatcagcgccgaccagatcggcaatctgattacgggcgatatctaccgcttcttcagcctgccagccgaaacggtgagaacgggaggccgggttaccaaaggttccgtccatcgtcataaactgcatcattttctcggcaacacgcgggtccaccggcgtggttgcggagtagtcgagataaatcggtaatttcattgctctataaactccgtacatcactcaatgcaaggaatcaggctaccggctggatgtacgaccgtgtttacggagtatttagcactccggcctgattctgaattctttttattaagcgcgtaacttaacgtcgatcgcgtcttgtgtgcgggtgcgtggcgcgtcgtgagtatgctgacgaccagacacatccagcacttcctggttattaaccagttcgcctaaagtaatgttgttgagaaaaccggtgagacggtcgctcaaatcacgccacagcgcgtgggtcaggcatttatcgccgccctggcagccgcctttaccctgacaacgggtggcatctacagattcgtcaacggcgctaattacttcgccaacggcgatgctgctggcatctttgcctaacagataaccaccgcctggtccacgtacgctggaaaccagaccatttttacgcagacgggaaaacagttgttccagataagaaagggaaattccctgacgttcggaaatatcagccaacggtaccgggcccgcttcagagttgagcgcaacgtcaagcattgcggtcacggcatagcgccctttagatgtcagtctcatgtcttacttcacctcaaactcgcccctgcccggggttttttattgtaaaagtgggggtattgcatagcagggtcaagtctgacattcccgagtaaattggtcaactatttacttgactgatttagtcgggtatttaaccttcagtgccatttttttatcgtggcgtttgtacctgttgtcggatgcggcgtgaacgccatatccgccctggggttctgtacactgtaggcctgataagacgcattacgcgtcgcatcaggcaacggctgtcggatgcggcgtgaacgccttatccgacctacggttctgttcactgtaggcctgataagacgcattacgcgtcgcatcaggcaacggctgtcggatgcggcgtgaacgccttatccgacctacggttctgttcactgtaggcctgataagacgcattacgcgtcgcatcaggcaacggctgttattcggccttgttacctttattctgctgctcaatagaagccagaatcccgcgcaggatattcaactcctggctttccgggcgcgcacgggtaaacagacggcgcaatttattcatcacctgccccggatggttttcacggataaaaccggttgccagcagcgtttgttccagatgaccataaaaacgctccagatcatcgaccagcggatacggcgtctcttcatgctcgacctgctcgccgttttcctgagttgccagccaggccatgcgcacttcataggcaataacctgaaccgccatcgccaggttcaggctgctgtattccgggttagccgcaatcgcgacatgataatggcatttctgcaactcttcattggtcaagccgacgcgctcgcgaccaaacaccagcgccaccggggtatttgccgcttcagcgacgcttttcaggccgcattcgcgcgggtcgagcatcggccatggcagcgtgcgggaacgtgcgctggtgcccaccaccaggctacaaccggctaacgcttcgtcgagcgtatcgacgatgtgagcattaccaatcacatcgctggcccctgctgccagggcaatcgcctgggagtcgggtttcaccagtggattaaccagccacagattggttaatcccattgttttcatggcacgggcaacagaacccatattgccggtgtgactcgtctccaccagcacaattcgaatattttgcagcattgtctttcttcatctaaagattattcacgcatcttatcataaaacgaagacagatgccgatctcgctgctatactctgcgccgttttcccgttctttaacatccagtgagagagaccgatgcatccgatgctgaacatcgccgtgcgcgcagcgcgcaaggcgggtaatttaattgccaaaaactatgaaaccccggacgctgtagaagcgagccagaaaggcagtaacgatttcgtgaccaacgtagataaagctgccgaagcggtgattatcgacacgattcgtaaatcttacccacagcacaccatcatcaccgaagaaagcggtgaacttgaaggtactgatcaggatgttcaatgggttatcgatccactggatggcactaccaactttatcaaacgtctgccgcacttcgcggtatctatcgctgttcgtatcaaaggccgcaccgaagttgctgtggtatacgatcctatgcgtaacgaactgttcaccgccactcgcggtcagggcgcacagctgaacggctaccgactgcgcggcagcaccgctcgcgatctcgacggtactattctggcgaccggcttcccgttcaaagcaaaacagtacgccactacctacatcaacatcgtcggcaaactgttcaacgaatgtgcagacttccgtcgtaccggttctgcggcgctggatctggcttacgtcgctgcgggtcgtgttgacggtttctttgaaatcggtctgcgcccgtgggacttcgccgcaggcgagctgctggttcgtgaagcgggcggcatcgtcagcgacttcaccggtggtcataactacatgctgaccggtaacatcgttgctggtaacccgcgcgttgttaaagccatgctggcgaacatgcgtgacgagttaagcgacgctctgaagcgttaatgactcaggcgggtgatatcactcacccgccctcgcctttcaggcgctattccgaaatacttcctcactgctttactttctttcgtcactctcccaccatctttccccgattaatggatgataaagaagagccaaggaaaggttatggcactgccagtgaacaaacgcgttcccaaaattctgtttattctctttgttgttgccttctgcgtttatttagtgccgcgcgttgccatcaacttcttctattatcccgacgataaaatttacggtcccgatccctggagcgcggaatccgtcgaatttacggctaaggacggtactcgtctgcaaggctggtttatcccttctagcacgggccctgctgacaacgccatcgcaaccatcattcatgctcacggcaatgccggaaatatgtccgcccactggccgctggtcagttggttacccgagcgtaatttcaacgtttttatgtttgattatcgcgggtttggtaaaagtaaaggcacgccgtcccaggccggattgctggacgatacgcaaagtgccatcaatgtggtgcgccatcgcagtgatgtaaacccacaacgtctggtgctgttcgggcagagtattggcggggcgaatattctggatgttattggtcggggtgatcgtgaaggcatacgtgcggtgatcctcgactccacatttgcctcttatgcaaccatcgccaaccaaatgatccccggcagtggctacttacttgatgagagttacagcggcgaaaattatatcgccagcgtcagcccgatcccgcttttactcattcacggtaaagctgatcacgttatcccatggcagcacagcgaaaagttgtatagcctggcaaaagagccaaaacggttgatcctaatcccggatggcgaacacattgatgctttttccgatcgtcacggcgatgtttatcgcgaacagatggtggactttatccttagcgcgttgaatccgcagaactaacccatgatcgctagcacgataatcattcacaaaaccaccttaagacatgctaatccactggtcagaacagtttaagatgagaaaaattctgtgacgcttgccaacatttctgatgattagcattcccttcgccatttccttgagcaaactttagctattcttatcaattatgcttatgggagatctacagatgatgcctacgcttgctccaccatctgtccttagcgctccccagcgccgctgccagatcttgctgacgctctttcagccggggttgaccgccaccatggcaaccttcagcgagcttaatggtgtggatgatgatattgccagtcttgatatcagcgaaacaggacgggagatcctgcgctatcatcaactcacactgacgactggttatgacggtagctaccgggttgaaggtacagtgcttaaccaacgtttgtgtttatttcactggctacgacgtggtttccgtctgtgtccgagttttattaccagccaattcacccccgccctgaagagtgaactgaagcggcgcggaattgcgcgtaacttttacgacgataccaatctacaagcgttagtgaatctctgctcccgacggctgcaaaaacgctttgaaagccgcgatattcatttcctgtgtctgtatctgcaatattgtttgctgcagcaccacgctggaattacgcctcagtttaatccgctccaacgtcgctgggcggaatcctgccttgaatttcaggtagcgcaggaaattggacgccactggcagcgtcgggcgctccagcctgtaccacctgatgagccactgtttatggcactacttttttccatgttgcgggttcccgatccattgcgggatgcgcatcagcgggacagacaattgcgtcagtctatcaaacgtctggtaaaccattttcgtgagctgggaaatgttcgtttttatgatgaacaggggttatgtgatcagctttatacccacctcgcccaggcgttaaatcgcagtttgtttgccatcggtattgataataccctgccggaagagttcgccagactgtacccacgcctggtgcgcaccacccgcgcggcgctggccggatttgaaagtgaatacggcgtccatctttctgatgaggaaagtggtctggtcgcggtgattttcggtgcctggctaatgcaggaaaacgatctgcatgaaaaacagattattcttcttaccgggaatgatagcgagcgagaagcgcagattgagcagcagttacgcgaactaacgttactgccgctcaacattaagcatatgagcgtaaaggcatttttgcagacaggcgctccgcgtggcgcggcactgattattgcgccttataccatgccattaccgctctttagtccaccgctgatctatacggacctgacgctgacaacacatcaacaggagcagatccgcaaaatgctcgaaagtgcatgatcagcaactgggaacaactttcgggcgcaaaaacattgccggaagcgccaccagcgccattacccagaacacgccgtggcccagatattgatacaggaaaccggcgaaaacggtcatgatagcgatactgccgcccatcgcgacggcagagtaaaccgcctgtaaacggatgacttcgctaccctggcgagcagcaatataacgcatggcggccaggtggcagaccgtgaaggtgccgcaatgcagaatttgcaccactatcaaccacggcaacgccgtagttgctcccataatgccccagcgcactacgccgcaaatcgcgctgatcaacagcatatcgcgtgcactacaacggcggaaaagtttattactcagcgcaaagataatgacttccgccaccacgcccaggctccacaaataccccaccgcgctggcgctgtagccagctgcctgccagtaaatggcgctaaaaccgtaataggccgcatgtgccccctgcaataaacaaacgcaggccagaaagcgccagttctggcgaaccagcgccaaccacgcagaccaaccggtgctctcctgctggcgacttgccccttgtggctgaatcgtcggacggatgagaaagccgagcagcatggatgccacgcccaacgtcaacagcgcgaggatcacccgataatcaaacatagtgaccagtttgcccgtcagcgcgctgccaatgacaaacgccacgctgccccacagtcgcactttgccgtaatcaagcgggaactgcttttgccacgtattcgccagtgcatcggtcaacggtaccagtggactgaaaaagaggttaaagccaatcatcaccagcatcagccacgctacgtgcgcccccgcccagaaggcgacagcaaagagaagtgtcagcagtgccagcacgcgcaaggcggaaatcaggcgggaaggatcgctgacgcggggcgcgatgagcaaactcccgaggaaacgggcaaccagacctgcccccaataacaggccgatggtttctggcgttaaaccaatccctttaagccagacgctccagaaaggtagaaaaatgccgtaactaaaaaagtatgtgaaatagccgagcgccaaccagcgcgtggattgcaaaaccatgagtccctcccgtcaggaggcgttagtctggggttaatcgaatgttggtgcaagttgaaaaataagaatattcgagcctgcttcccgatgtctgtaacgccagttcacaagcactaaaaaactgagatccgcgacgcatgttgcaaaaataatgcgtaattatgccgttacgcttgccaaacgttcctgcacaatggcgatgaaatcgcgtaatgccggcttcatctcccctttcttccacgccatcagtaaagcaatggaaggcacatttccggcaatgggacgaaaaacaacctgtccggtattaaaattattcatataaccgggtatcaaagtgacgcccagccccatgcccaccagattcatggtcaccagaatattcgttgccacctggacgatatttggctggctgttttcttgcgcaaaccacgctttaacgatcggcgcaaggctaccggaatacaccggatcggtactgacgaaattcacgccatccagttgcgcggcggtgatctctttttcatgtgctaaagggtgatcaaccggtaacacaaccactaatggttcgtcaaaaagctccagataatcaatctccgggctataaacaggatggcgcattaagccgacgtcgagttcaccacggcgaattttttcctcctgttgcgtggtgattaaactcaccagctcaatcaaggtgtctggctgtctgagacgaaacatcggtaatacttttggcagtaaattcacttccgcgcttggcacaaagccaatggttaattgtctgtcttcctgaacaattttccgcgcccgtaatttggcattttccgcttgttcgaggattgccagcgcgtcctggagaaaacattctcccgccgccgtcaacgcgactttgcgcttatccctcaccagtaacggaacaccgacacagttttcaagatcgcggatctggctgcttaagctaggctgactggtatgcagtttttccgccgcacgggtaaagttcagtgcctgcgccactgcgacgaaatagcgtaaatgccgtagttccatcaccttccccttgttatcgaaaaaacgtctcagctggtagaaattaactatttcacatattagcaaccaaccagcaacatccttatggcacaaaaatagaaggtcaatacatcttatctttcaggattaaaaaatatgaccacacccagtgatttgaacatttaccaactgattgacacccaaaatggtcgggtcactccgcgtatttataccgacccggatatttaccaactggagcttgagcgtattttcggtcgttgctggctatttctcgcccacgaaagccagatcccaaaacccggtgatttctttaacacctacatgggagaagatgcggttgtcgtagtgcgtcagaaagacggcagcatcaaggcgtttctcaaccaatgccgccaccgggccatgcgtgtgagttatgcagattgcggcaacactcgcgcctttacctgcccgtatcacggctggtcttatggcattaacggcgagttgatcgatgtaccgctggaacctcgcgcctacccacaagggttgtgtaaatcccactggggactaaacgaagttccttgtgtggagagttataaagggctaatttttggcaactgggataccagcgcaccgggcctgcgtgattacctgggtgacattgcctggtatctggatggcatgctggatcgtcgcgaaggcggcaccgaaattgtcggcggcgtacaaaagtgggtgatcaactgtaactggaaattcccggcagagcagttcgccagtgaccagtatcatgctctgttcagccatgcttctgccgttcaggtattaggggcgaaagatgatggcagcgataagcgcctcggtgatggacaaaccgcccgcccggtgtgggaaaccgccaaagatgcgctgcaatttggtcaggacggtcacggtagcggtttcttctttactgaaaaaccggatgctaatgtctgggtcgatggcgcagttagtagctattaccgcgaaacctatgccgaagcagaacaacgtttaggtgaagttcgcgccctgcgcctggcgggtcataacaatattttccccacgcttagttggctaaacggcactgccacactccgcgtctggcatccgcgcggccctgatcaagttgaagtgtgggcgttctgtattactgacaaagccgcctccgatgaagttaaagccgcttttgaaaacagcgccactcgtgcttttggtcctgctggttttctcgagcaggatgacagcgagaactggtgtgaaatccagaaattgcttaaaggccaccgcgcccgcaacagcaaactgtgtctggaaatggggcttggtcaggaaaagcgccgcgacgacggcattcctggcattactaactatatctttagtgaaactgccgctcgtggaatgtaccaacgctgggccgatcttctgagtagcgaaagctggcaggaagtgctcgataaaaccgccgcttaccagcaggaggtgatgaaatgagtgcgcaagttagtctagagttacatcaccgcattagccagtttctctttcacgaagccagcttactggacgactggaaatttcgtgactggctggcgcagctcgacgaagagattcgttacaccatgcgcaccacagttaacgcgcaaacacgcgaccgccgcaaaggcgtccagccaccgacaacctggatttttaatgacaccaaagaccagctggagcggcgaatcgcccgtctggaaacgggcatggcctgggcagaagagccgccgagtcgcacccgtcacttaatcagcaactgccagataagcgaaaccgacatcccaaacgtatttgctgtgcgggtaaattatctgctttatcgggcacaaaaagagcgcgatgaaacattctatgttggaacgcgtttcgacaaagttcgccgtctggaagatgacaactggcgcttgctggaacgggatatcgtcctggatcaagcggtaatcacttcccataacctgagtgtactgttctgatgaatcgaatttatgcgtgtcccgttgcggatgtgccggagggtgaggctctccggatcgataccagccccgtcatcgccctgttcaacgttggcggcgagttttatgccattaacgatcgttgcagccatggtaatgcgagtatgagtgaagggtatctggaagatgacgccacggtggagtgcccgctacacgccgccagtttttgcctgaaaacggggaaagcgttatgcctgcccgccaccgatccgctcaccacttatccagtacacgttgaaggtggtgacattttcatcgacttaccggaggcgcagccatgagcgatctgcataacgagtccatttttattaccggcggcggaagcggattagggctggcgctggtcgagcgatttatcgaagaaggcgcgcaggttgccacgctggaactgagcgcggcaaaagtcgccagtctgcgtcagcgatttggcgaacatattctggcggtggaaggtaacgtgacctgttatgccgattatcaacgcgcggtcgatcagatcctgactcgttccggcaagctggattgttttatcggcaatgcaggcatctgggatcacaatgccagtctggttaatactcccgcagagacgctcgaaaccggcttccacgagctgtttaacgtcaatgttctcggttacctgctgggcgcaaaagcctgcgctccggcgttaatcgccagtgaaggcagcatgattttcacactgagtaatgccgcctggtatcctggcggcggtggcccgctgtacaccgccagtaaacatgccgcaaccggacttattcgccaactggcttatgaactggcaccgaaagtgcgggtgaatggcgtcggcccgtgtggtatggccagcgacctgcgcggcccacaggcgctcgggcaaagtgaaaccagcataatgcagtctctgacgccggagaaaattgccgccattttaccgctgcaatttttcccgcaaccggcggattttacggggccgtatgtgatgttgacaagccggcgcaataatcgcgcattaagcggtgtgatgatcaacgctgatgcgggtttagcgattcgcggcattcgccacgtagcggctgggctggatctttaaggaagcacgatgaaagaaaaaacgatcattattgtcggtggcgggcaagcggcggcaatggctgcggccagcctacgccagcaagggttcaccggtgagctgcatctgttttccgatgagcgacatcttccttatgaacgacctccactcagcaaatccatgttgctggaagattccccgcagttacagcaggtgttacccgctaactggtggcaggaaaacaatgttcatctgcattccggtgtaaccatcaaaacgctgggtcgcgacacacgagagttagtgttaaccaacggcgaaagctggcactgggatcagctttttatagcaaccggcgcggcagctcgaccgctgccgttgcttgatgcactgggagaacgctgctttaccctacgccatgccggtgatgccgccagactgcgagaagttctgcagcccgaacggagtgtcgtgattatcggtgccggaactattggtctggaactggctgccagcgccacgcagcgcagatgtaaggtgacagtgattgaactggcggcaaccgtcatgggccgtaatgcaccaccgcccgtgcaacgctatcttttacagcgccaccagcaggctggtgtgcgcattctgctcaataatgccattgaacatgtggtcgatggtgaaaaagtagaactgacgctgcaaagtggggaaacgcttcaggctgatgtggtgatttacggtattggtatcagcgccaacgagcaactggctcgcgaggccaaccttgatactgccaatggcattgtcattgatgaggcttgccgcacctgcgatcccgcgatctttgccggtggcgatgtggcaatcactcgtcttgataatggtgcactacaccgctgcgaaagctgggaaaacgccaataaccaggcgcaaattgccgctgccgcaatgttagggctaccgctaccgctactgccgccgccgtggttctggagcgatcagtacagtgataacttacagtttattggcgatatgcgtggcgatgactggctttgtcgtggcaacccggaaactcagaaggcgatttggtttaatctgcaaaacggcgtgcttatcggtgcggtcacgctgaatcaggggcgtgagattcgcccaattcgcaaatggatccagagcggcaaaacgtttgatgcgaaactgctgatagatgagaacatcgcgcttaaaagtctgtaaccaggataattagcgaatatctcaatgcctggggcgtggcgaggtgcaagagtgtgtattacgtttaaaagtcattatcttgcaaagggattggttatgaacacactacgttattttgattttggagctgcccgccccgttttgttattaattgcccgtatcgccgtggtcttaattttcattatttttggttttcccaaaatgatgggctttgacggtacggtccaatatatggccagcttgggcgcgccaatgccgatgctggcagcgattattgcggtagttatggaagtgcccgccgcgatattaatcgtgcttggctttttcacccgtccgctggcggtgctgtttattttctacacgctgggtacggcggtgattggtcaccattactgggatatgaccggcgatgcggttgggccaaatatgattaatttctggaagaatgtcagtatcgctggcgcgttcttgctattggcaattaccgggccgggggcaatttctctcgatcggcgttaagaaagatgccggatgcggcgtgaacgccttatccggcatttaataaattacagccactctacccgcaagctcatctcactagttgtactttcccctggtgctagcgcaatgagatcacccccttccgggcgatgatgatcatccggcgcatggctcatcggttccagacagaagaaatcaaacgcatatcctttatcaaacgcagggtcggaaacaaagatgaaataacacggtgcaggtggcgtcgtttccatgatgatggcataaccttcctgcggctgctcgatgcgggcctgaccattccatccggcaaaaccattgttcacccactggcgcggcaacggcgcgggctggttaaaatccagttcctgcggtagctgctcgcaaaactcacccgccagccactgctcccgctccagccagtaaccgctcgcctgtgcctgaatccgcgtttgcgggctcaacggaaaataaggatgccagccggtaccaaatggcagcgtctctgccccttgattggtgacagagagcgtcaccgtcagcgtatccgccgttaaatgaaacgcctgacttacccgatagtgatagacaccgctgcgatgttcatacaccagacacaaactatcatcgctgtggctgacacattgccactcgcccagccagccatcgccgtgtagatagtgcgcatcccactcaacattcggttgcagttgatactcacgcccctgccagacaaaacgattgccgctcacccggtttgcaaatggcaccagcggaaaacaactggcatcggttgccacaccgctttttttaccaggacgtaagagcggcgtcgtatcgcgccagaagccttcgattacgccgccctggtcagaaacgtccagctttaggctcccgtgggataaggtatagatggtcatccgctaactccttaatccgggaagttaatcacaactttcccgcatttgccgctcgccatcagcgcataggcatcacctgcctgttccaggctgaagcgatgggtaatggcgttacgcggccacagcttccagtccgtcagatcatgggcgcatttttccatatggaacagactggtcacccaggagccgataatccgccgttgatggtgcatcagatcggcgctgacctcgaattccacttttccggtttcaccaatgtaaaccacccgtccccagtcagcggtggattgcagtgccagcaagcgacctgcggcattaccggaacaatcgagcgcaacatccgcgccaccgtgggtgagttcggcgataatctgcggcagaccttcggtggttgctaaatagccgtgatccatcacccctaactgttttgccatcgccagacgttccggcagcatatcaacgccgatgatccgttttgcaccgcgacctttcgccagcatcatcgccatcatgccgactggccccagaccgaccaccagcacgttatcactgccggaaacttcgccgcgcaaaattccttcatacgctgtaccaacgccgcaactgataaacgcaccatcttcgtagctcagcgcatccggcaggaggatcagatctttttcttccgccagcaagtattcggcatgaccgccgtcacgctgccagccgtaagccgcttttccttcgccagtacaagaaataggaaaaccgcgacggcagttcgggcaaaaaccacagccagaaatgtgatacaccagcacgcggtcgccctctttaaaatggcggcagccttgccccatcgccacaatctgcccgcacggttcatgaccgttgataaagccctggtataacggtttatcgggtgccgccgctgtggcacggtgttgatgatagatatagtggacatcgcttccgcaaatcccggaggatttcattttgatcagtacctggttaatccccggcgtcggcaccgcaacttcccgcagatcgacggtgctatttcctggtaaataagctgccagcatcgttttcataaatccctcattaacaatacgattaattttcatccctgccgcacccgcgccaggggcgttaaggtttagcgtttcgctttactgcttcgctgggtcagcaagatattcgccagcaccgccaccacgatgatgacgccgcgtaccacctgctggaaaaaggagttaataccgagcagcaccagaccgttaccgattagcgtaatcaccagcacaccaagcaatgtaccgaacagggaaccgcgaccgccggaaagtgccgtaccgccgaccacgaccgcggcgatgacgtcaaactccagaccgtttgcggcacctgcgttaccagaaccgaggcgcgccgccaacaaaatgccggtcaccgccgctaataatccgctaagggtaaagataagaatgcgcacccgacgaacgttgatgccgcacaactgcgccgccgtagcattaccgccaacggcaaaaacgctgcgcccgaaggcggttttgcggctgatgaacacaaacagcgcaaacaacacaatcatgatcagcgcggataccggcacaccgagaaattgtccgcccagccagtccagcacctcgttttcatcaatcggcactggcagtgcgttcgtcataaacagccccattccgcgcagggcgctccacagccccagtgtggcaacgaaacttggtacattaaacacgccgcgcagcaccccggccagcgttcccatcagcgcgcctaacagcaacaccagcaggcacgccaccgccagcggaacttcaaattgcagcaaaaatgccaggcacacgctgacaaaagccaccatcggcccaacgctgacatcaatttcaccggagataataatcagcgtcatcgcccaggcggcaatcccaatggtggcggcatcgcgcagcacgttcatctggttattcaaactgataaagccaggcgcgttcagggagaagaccagataaagaatggcaatcaccaccagcaaaccgatctcattaatatggcgactgacaaattgtttgaggctgacgctcttgccctgcggcaatggtaaactgctagcagacatcttcaggttcctcggtaaaattcatcagtgcacagacagaatggcggacatcagctcatccacattgaccggagcgtgaaactcctggctgaacgtgccgtgctgtaataacaggatgcggtcacacaccagcggcaactcctccacttcactggagataaacaccacgctttttccttcggcagccagctcacggacaatacggtaaatctgctgtttggcttcgatatcgacgccgcgcgttggctcgtcgagcaacaaaatctggctggcagcatagacccaacgaccgatcaccactttttgctgattgccaccagaaagcgtgccgatgggtgtttcgctactggcggccttgaccgtcatccgctgcatcacctcttcggtcaggcggcggatggtggaccattgcagcacaccgttggcgctgattttttgccgattggtcagcactgtattttcgtcaacgcccaaccagggaatgatccccgcttctttgcggttttctggcgtatagccaatgccgcgtttcagcatgtcgccgtaatcggggcgcgtgattttctcgccgttgataacaatttcgccctgttcatactcctccagcccaacaatcgccttcagcaattcactgcgccctgcccccagcagaccagcaatgccgagcacttcgccacgacgtagcgtaaaactgatatcctccagcttgggcttatggcgtaacgcacggacttccagcacggcctgatccacaatttcctgaggggctaccggcgcaatatcaacgtgatcgcgcccgagcatcaggctcacaatatgatgcgtggaggtgttttcgagcatcacatcgcccgccacctgaccatcgcgcataacggtggcacaggaggcaatgcggcgaatttcttccatccggtggctgacataaatcaccgccacgcccagtgcgctcatctttttcaccgcgctgatcaccagttcaacttccgcactcgcaaggctactggtaggttcatcaagaatgaccacgcgcggctcgcccttcatcacccgcgcaatttccaccagctgcttttgcgccgggcttagcgtactaacaagttgttcaggactaacgtcaacgcccagcgcctgtaagcaacgttgggcatcctgcgccatttgcaggtaatcaatcatgccgttgcggcggggccactgaccgaggcagaggttttccgccactgtcagcccttccaccagacttaactcctgataaaccgcgcgcacccccagttcagcggcacggcgagtcagcgtagcttcgtcaccttccagtcgcgtctcgccaatccagatatcaccgctatccgggcgttcgctgccggtaagcattcgaatgagagtgcttttgcccgcgccgtttttacctaacagcgcacgaacttcgcctttattgagcgtgaagttaacgttatccagcgcaacgacgccgggataacgcttatttcctgccaccacttttgctaccgggactgcctctgttgccgtgaacatagggacctctgcgaatcagcgattagggcagaccatcaacgtgcgttgccagccactgtttaccgtcttccgttttggtatagagatcgataggcacctgaatcactttttcaccgtcggcttgtttattgataaccttcaatgtttgcgcgaaaacagcattgcccattttcttaccggaaatatccactaccgctttcagcacctgattgttttccagctcctgagcaatttcggttgtcatatcgctaccgaaaacagcaatttttccggcctgattttgattacgtaccgcttttaccgcgccgagtgtcgcaccgccgctttcccccataatggcgttgagatccggcgtggagataattagtttttcaccaacggaaatcgctttatctaaaacagtcccttcctgattagcgacaatttgcgcgccgggaacgcgggattttaaaacttcttcaaatcctttacgtcgctgcacacaaacttcaaaggcttcgcaattgatgacggcaattttcggctggtcaattttattggcaataaaataatcagcggcagcgttacccagttttttaccaaattccagcggatcgccgaccagatacgcgctgacatatttatcgacccccttttgattaatacaggtgttgtagcaaatcaccggaatgcccgcttcactggcgcgacgaacggtacggctactgccattttcagacactgcgcttaaaataatggcatcgacattacgcgccacgagggtatcaacaaaggtactttctttgctaatatcaccctgggcgttagtttctattaactgaacttgtacactggaatcttttgccgcatcctgaacgccctgacgcactccagcgtagtatccctgagtatcaaggtatattgcgccaatggtcatttctttttccgcagccctggcaaatagtgcgctacctaatagcgtagccattaataatagattacgggttgttctcatttttgtaggcatagagcctcctgtagggtttttattaacaacggcttattctaattattttgtgatgagcggcagcgcgtgccgctcaaatattacagttaatagggtttagtgaacgcggttaaaaataaaaggcatcacggtggtgaataatgccgctttcggccaagccggattaatcgccgtcaattcagcgcgagcagactcatattgcgcaacctccccgagtcccgcggacgccagcatcgccaccatcaggcatttttctttatgctgctgttgtaaatcgccatacaggctcaacaagtcaggttggctgacggcaaagaaatccgcttcgatactggttttcgccatctcttgcgcccactgtttcatttcactaaacagttgctgtgcggtttgttgttcgcccagcagtcgcagcgccatcccttgccagaagagataatcaaccggctgatcgttgtaataactgtgaatgttaatagtgcgatcgccggtcgccgccagacgtaaacaacgcgtcgcttcagtttcatcgccctgcgcgttggcgcatatcgcctgccagaaccagatgtcgttatcagtttgccccggtaaacggccttcgcttaaattctccggataatgcagcgcggcatgaagcagttcgcaggcctgctgcggctgtctggcatcaagatgctgccaggcgcgtaataactggttgaggataaactgactggtgaccttcccttccccgccttcccacgggtggaatttgcgcgtggcgagaatgtccgccgctttgtctgcctgacccgtgagatgccacaaattgagcagttctgcggtcatgtcgtcgcgtttcagcgcaatttccagattattttccagacgcgccagtcgtttctccggtgtggctccacttaacttatccagcaaatcccgttcgaaaagcagacgtgcatcctgcggcgcaagctgataagcattatcaagataacgcgcggccagctcataatcgtgttgcttattccacgcatggatcgctaacccgcgccagccgtcggcaaactccgggctcatctctacgcaacgttgccaaaaggcaatggctttgttgtagctacgtttgttgtagtagaagcaagctagtaaatggcgagcaaaccagcactcttcaatactctccagcgccgccacttcttccagcgtattcgggaaacggacaaactgcgggaagacatcaatggcttttgcgaccagttcgccacgttcggctttcggcagcaagctggcttgcaggtaaagcggcagcgtgcgctggcagtccagtgcgttcagcatctctgccgccagggtgggcattccccagttaatcagttgcccggcggtcatcagggcgttaacgtcgcgtccctgacacagaccgcgccactgcgcgagagcactttcgctacgaccatcgaaccagttcagccaccacagagtggcgttcagcggataatcgcgcagcagtttctcgcgctgcacacgcgcgttgtcctgacgaccacttaacaccagcagcagattatgcaggcaaagcacttcctgattggttgggcaggcgcgaagactttgttggcaaaaatccagaccagcgtcgaagttaccattacgcgccgccagtcgtgccaggccataatagccaccggctttgctgttgccgctccagaccgcacgccagaaatcctcttcggcttgttgatattgtccctgacgttcgtaagcactggcgcgaatcaaactcgcctgtccgcactgcggatttttgttcagcgcatgtgcgcgtttcagagcctgagtggcatacgccaccgcttgcgggaaatctgcgcggttatattccagcatcgccagcgccaggttacagcgataatccagcgggtccagcgccacgccgcgcaggtagtaatcgaacggactacggctggcgtgatgatattgctccagatgctgaccgataaaccaggcttcatctgtactggtaatgtcttgtgctgccagtggcgctttggcgacgtccggtaacggcaacgcttgcggctgatgttcctgataactcagtacaatattgccgtcggcatcggagagctcaatggtcagcctttcaggattgataccgtgcaacacgccctggatggcggtcgcaggcatcagtgccacggcatcatcaagtaacgcgttgcatttaccgatttcgcggatcgccaggcggtatccgttcaacggagagatggcatacagcccccactcaatcccccgcttactacgctggagttttatcaccgcatcgcgggaggcattttgcaccatgcccaaagaatgataaggcaggaaatactgctcaaaacgcttctcttcgtaagcatcaagccaggtaaaatcgggctggttatcggcaaaaataccggtcatcagttcgatatacgggccgttattgtcggtcagactcttatcccacgcctggccaaattcactgtgtccccaactccactgttttttacctggcgcaatatggtggttggcaacgtgcagcaaaccgccatcttcatcgtgacaccacgcgccgacaaaatcgtactggcttttttcggccatataactggttggaacaggcacatttttatagcgagaaatgtccactccagcggagtagtccactttgtagtaagtgccggtagcgatggggaaagcggagacggcccgtttgccgtgatcaaacaccgccgttacatccggcgggaagacgctctgatgcccttccccccctttcactgccgggttggcccaccacaagaaatgacgcggcgtggcgttcccgttatagacgcggctggcgatttccagcgccgcccggtcagggcgcagggtgaaacctgtcatcacctgtaaaccatgcatcggctccgtttcgcctacccacaccgtctgtgcaccgtcttcatgggcttcgagggtgaaatcaacgggcataaaggtggtcgggcgatgatgttgcggccagttaaactcaatcccaccggaaatccacggccccagcagccccaccagcgcaggtttaatgacttcattgtgataaacaaaatcgcgctgtttcactttatcccacgcgcgatgcacccgaccgcccagttccggcaggatcatcactttgatgtagtcgttttccagccacaccgcctgccaggatttcagggttttctgctcgctcagcgtatcggtcacgccgtagggataaaccgcgccggagcttccctgataaacgcgattttccaggaacatgggatgtatatcctgcggcccggtttcataggtcgggatctcaacgcgctcttgccacacttttactggagtcatggtgccctcaatattaacaagacatactgaattaaaagatttgtggcagtgtattgaacaatctggcaatgttttcgcggaataatcacgcaattaactaaacaaggtttagtgaagatgagagcctgcattaataatcaacagattcgccaccataacaaatgcgtgattctggaactgctgtaccggcaaaagcgcgccaataaaagtacgctggcccggctggcgcaaattagcattccggcagtcagtaatattttgcaggaactggaaagcgaaaaacgggtggtgaatattgacgatgaaagccagacgcgcgggcatagtagcggtacatggctgattgcgccggaaggtgactggacgctgtgcctgaacgtgacgcccaccagtattgagtgtcaggttgctaatgcttgtttaagtccgaaaggtgaatttgagtatttacagattgatgcaccgacgccgcaggcgctgctgtccgaaatcgaaaaatgctggcatcgccaccgtaaattgtggccggaccataccatcaacctggcgttggcaatccacggtcaggttgatcctgtgaccggcgtgagccaaaccatgccgcaagcgccgtggacaacgccggtggaggtgaaatatctgctggaagagaagctcggcattcgggtgatggtcgataatgactgcgtgatgctggcgctggcggagaaatggcaaaataatagccaggaacgggatttctgcgtgatcaacgttgattacggcattggcagcagcttcgtgattaacgagcaaatttatcgcggcagtttgtatggtagcggacagattggtcacaccatcgttaatccggatggcgtcgtctgcgactgtggacgttatggctgcctggaaactgtcgccagcttaagcgcattaaaaaaacaggcgcgggtatggctaaaaagtcaaccggttagtactcaacttgatcctgaaaaactgactacagcgcagttaatcgctgcctggcaaagtggagaaccgtggatcaccagctgggttgatcgctctgccaatgccattggtttgagtctgtataacttcctcaacatcctcaatattaatcagatttggttgtacggtcgcagttgtgcctttggtgagaactggcttaatactattattcgccagacaggatttaacccgttcgaccgcgacgaaggaccgagcgtgaaagcgacgcaaattggctttgggcaattaagccgcgcacaacaggtgctgggaattggctatttgtatgttgaggcgcagttacgacagatttgatggcgcgataacgtagaaaggcttcccgaaggaagccttgatgatcataaacgaaaaattgcctgatgcgctacgcttatcaggcctacacggagattgcaatatattgaatttgcaaagttttgtaggccggataaggcgttcacgccgcatccggcatgaacaacgagcacattgacagcaaatcaccgtttcgcttatgcgtaaaccgggtaacgtgcgcagatgtcgagaactttacctttgatgcgctcgataacggcttcatcattgatgctgtccagcacgtcacacatccagccagccagttctttcgcttcggcttctttaaagccgcgacgggtaatcgccggagtacctacacgaataccggaggtcacaaacgggctcttcggatcgttcggtacgctgtttttgttgacggtgatgttagcacggcccagagcggcgtctgcttctttaccggtcaggtttttatcaaccagatcaaccaggaacaggtggttatcagtgccgccggaaaccactttgtagccgcgctcgaggaacacttctaccatcgctttagcgtttttagcgacctgctgctggtaagttttgaactcaggctccatcgcttctttcagagcaaccgctttaccggcgattacgtgcatcaacggaccgccctgaccaccagggaaaacggcagagttcagttttttgtacagctcttcgctaccacctttcgccaggatcaggccgccgcgcggacccgccagggttttgtgagtggtggtagtaacaacgtgagcatgaggaaccgggttcgggtagacgccagcagcaaccaggcccgcaacgtgcgccatatcaacgaacaggtaagcaccgatgctgtcagcgatttcacgcattttcgcccagtccaccacgccggaatatgcagagaaaccaccgataatcattttcggcttgtgttctttggcttgtttttccagatcggcgtagtcgatatgaccggtagcatcgataccgtaaggaacgatgttgtacagtttaccggagaagttaaccggagaaccgtgagtcaggtgaccgccatgcgccaggttcatacccagaacggtatcacctggttccagcagcgcggtgtagaccgcaaagttagcctgggagccggagtgcggctggacgttagcgtagtcagcgccgaacagttctttcgcacgatcgatcgccagttgttcaacgatatcaacatactcgcaaccgccgtagtagcgtttgcccggataaccttcagcatatttgttggtcagctgagaaccctgcgcctgcattacgcgcgggctggtgtagttttcggaggcgatcagttcgatgtgctcttcctgacgtactttttcctgctccatagcctgccacagttcggcatcataatcggcaatgttcatttcacgctttaacatccgcatctcctgactcagctaacaataaaatttttggcctttataggcggtcctgttggacaacggcgaacagtataaccgaatcattgtgcgataacaggtcttgacaaaggaatttacgcaaacgattaccttcaggctacgcaaggctttggagaataaagagcttgcaaccggaaacggatttcttttcaggtttgtgatgcaaatttttcacttcatcacattctttctgaaaaacaccaaagaaccatttacattgcagggctattttttataagatgcatttgagatacatcaattaagatgcaaaaaaaggaagaccatatgcttgacgctcaaaccatcgctacagtaaaagccaccatccctttactggtggaaacggggccaaagttaaccgcccatttctacgaccgtatgtttactcataacccagaactcaaagaaatttttaacatgagtaaccagcgtaatggcgatcaacgtgaagccctgtttaacgctattgccgcctacgccagtaatattgaaaacctgcctgcgctgctgccagcggtagaaaaaatcgcgcagaagcacaccagcttccagatcaaaccggaacagtacaacatcgtcggtgaacacctgttggcaacgctggacgaaatgttcagcccggggcaggaagtgctggacgcgtggggtaaagcctatggtgtactggctaatgtatttatcaatcgcgaggcggaaatctataacgaaaacgccagcaaagccggtggttgggaaggtactcgcgatttccgcattgtggctaaaacaccgcgcagcgcgcttatcaccagcttcgaactggagccggtcgacggtggcgcagtggcagaataccgtccggggcaatatctcggcgtctggctgaagccggaaggtttcccacatcaggaaattcgtcagtactctttgactcgcaaaccggatggcaaaggctatcgtattgcggtgaaacgcgaagagggtgggcaggtatccaactggttgcacaatcacgccaatgttggcgatgtcgtgaaactggtcgctccggcaggtgatttctttatggctgtcgcagatgacacaccagtgacgttaatctctgccggtgttggtcaaacgccaatgctggcaatgctcgacacgctggcaaaagcaggccacacagcacaagtgaactggttccatgcggcagaaaatggcgatgttcacgcctttgccgatgaagttaaggaactggggcagagtctgccgcgctttaccgcgcacacctggtatcgtcagccgagcgaagccgatcgcgctaaaggtcagtttgatagcgaaggtctgatggatttgagcaaactggaaggtgcgttcagcgatccgacaatgcagttctatctctgcggcccggttggcttcatgcagtttaccgcgaaacagttagtggatctgggcgtgaagcaggaaaacattcattacgaatgctttggcccgcataaggtgctgtaatttgatgttgccggatggaaacatccggcaacccttgacgcggtttaaattgccgcgtcgtcctcttcaccggtacggatgcgaatgacccgtgccacgtcaaagacgaagattttaccgtcaccgattttgccggtttgcgccgtgcgaataatggtatcgacacaggtatcgacaatgtcgtccggtacgacaatctcaattttcactttcggcagaaaatccaccatatactccgcgccgcggtacagctcggtatggcctttctggcgaccaaagcctttcacttcggtcaccgtcatgccggtaataccgacttcggccagtgcttcgcggacatcgtccagcttgaagggttttataatcgcatcaatctttttcatgctattccttgaaaaggtcgcctgtcttttgatctgctaaacgtaacacataacgccaattcattccttgaaatcgtttgcatccagctcgtgtcgggaaagcagtttataaaattctgtccggttgcgccccgccattctcgccgcgtgggtgacgttgcctttggtgatttgcagcagcttacgcaaatagttgagttcaaactgattacgtgcctcaacaaaggttggcagcgccgtattttcaccctccagcgcctgctccaccagcgcatcactaatcaccggagaactggtcagcgccacgcactgttcaatcacgttgaccaactggcgcacattacccggccagctcgcggtcatcaggcgtttcatcgcatcggtagagaacgcgcggacaaacggtttatgtcgctctgccgcctggcgcaacaggtgatttgccagtagcggaatgtcttctgtgcgctccgccagtgccggaattttcaggctgacaacgttgaggcggtaatagagatcttcgcggaattccccgcgcgccatcgcttttggcagatcacggtgagtggcagaaataatccgcacattgatatcaatatcgcggttactgcccagcgggcgcactttacgctcctgcaacacgcgcagcagtttgacctgtaacggcgcaggcatatcgccaatttcatcgagaaatagcgttccgccttccgccgcctggaataaaccttcgcgattgctgacagcgccagtaaacgcgccacgcgcatgaccaaacagctcgctctccagcaattgctcgggcaatgcgccacagttaatagcaataaatggtttgctgttgcgcgggctggcgttgtggatagcctgggcgaaaatctctttcccggtgccgctctgaccgttaatcaaaacgctgacgtcactttgcgccaccagccgcgcctgttccagcaaacgcagcatcagcgggctgcgggtgacaattgcctcgcgccagcgttcatcggtggctggcgcggattgctccagcgcatcgtcaattgcctgatatagcgcgtctttgtcgacaggcttggtgaggaaactaaaaacgccctgctgtgttgcagcaacggcatcgggaatagaaccatgcgcggtaagaataattaccggcattcccggctgcactttctggatttcagcaaacagctgcataccgtccatttcatccatccgcaggtcgctgatgactaaatctactttttcgcgattcagtacccgtaatccttcagcgccactttccgccgtgaccacactgtagccttcgctggtcaggcgcaggccaagcagtttcagcaatcccggatcgtcatcgaccaataataaatgcgcaggtttatggctcatcaggagtgacctcatgggtggatggcgcgggcttttcactctcgtgcggcgtatccgggctgaaatttccagccggtttgcgggtgctgagctggcgttcaatatcggtcaggttttccagcttgcgggtggtgagttccagttgctgctgtagaacgtgatgttgctggcgcaatgtatccagctcgctgtcgctggactgctggagtttactgtaacgttggcgctcttccgccagttgcagttgcagcgcctgaccatcgcgccagagttgatacagtgggcgaacctgtgccgggatctcggtacttaacgcttcaatacgcgcgaccagctggcggcgctcatacggcgtaattttggcgtcggcgagcaaaatcccttgtttaaaggtattttgccagctgccgtcgtcatattggcgagcttgctgacggctctgcgcaggcattaaacgatcagcacaatccatcgcccgcagccagtaaagcggattggtttcggtacttttaccttgcagcgcccagatgtcgctacattcagtagaaagatagtcagccagttgataaaccggaattttttcttctgctggcgtatcaatggctggcttattgtgattctgcacgcaacccagcaatgccagacatggcagccctgccagccacagccgtcggggcaataatcgttgaaaaatgtgtcgcatattcaccagacttaaagcctatcccagtgggcgtaattgttgcagacagtctggacatggacagcgcggagaaaccggagcgtacatatcgtacgtgaagatttcgagcactgcccggggccgaactgacaaataaaatagcctgataggataggctgttagcattatttcgtgtttttgctgctcggtaattcaatgcggaaacaaacgtcttgcccgctctcgtcgaccagatacagttccccttgcatacggcgaatacaatccctggcaatgcttaatcccagaccgctgcccttcaccgccccttttcgctggtggcttccctgaaaaaagggttcgaagatcatggcgcgttcctcttgcggaatgggcgtgcctgtattgatgacatcaatataaacccgcgcaccatgtaaactgctgcgaaggcaaatgttaccggattcagccccgtagtgcaccgcattggagtaaagattatccagtacgctcatcagcagcattggctccgccaggcaagctgttgctttgagatcgacgtcggtatgcatcattttagcccgtgcgggcaggctatgagcagaaaccactgtctccaccagcggtgctaactcaacattctccagttccaccgcactgtccgcctgtttacggttgtaatcaagcagttgttcgatcagtttttgcaaattgcggctgctgctatcaagaatgctcaccacctctttttgctctggcgtaagcggcccgacaacctggtcagccagtaattcagtgccctcgcgcatactcgccagtggcgtttttaattcatgagataaatgtcttaaaaattgatggcgttgggattccagccaactcaggcgctcacttaaccaaagaatacgttgcccaacgctgcgtaactcgctcggtccactgaagctgacgctattgcccagagaacgcccttcccccagacggttgatcatgcgctcgatatttttcaccggcccgataatcatccgcgtgaaaagcagtaccattaccagactcaccagaaatagcaccaggctttgccaaccaaaatattgcccacgttcggcgatttcacgctgaagctgctgcccacgagagaacaccactgtgcgcgtggcctgtaccatttcggtattggcactggcaaaggcttcaagacgtgcggcggcggcagcatcgggaccgctgttgttacactgaagttgagccagattgtgcaaatcctgacgtaatgcctggtagagtttatcgtccggcagcacgcctgcgtgggcatcgagcatttcgctgtaacgcttgcgctggctttgataaaccttcgccagggttgggtcgtccagcacgcaatactgacggtaactacgctccatctccagcgccgcgttggtcatcgcttcactgcgccgggcatcaataagcgtagtgcggttaaccagcgccgcctgatcgctaagcgcattcaggctttgccaggcttgccatgccagcaccaacaggggcagcagaatcagcaaaaatgccagcattaccagttgtcgtaaactgcggggaaaaacgggccagcgtttcaaggtgttactctcgtcagacgcgaatagcctgatgctaaccgaggggaagttcagatacaacaaagccgggaattacccggctttgttatggaataaggcggtgcctaactcgacgtttcgcccgatggttgatatagctacgctgatatcagaagttggacggcaggcaccttgttgtgcgtcattcgtattttatgtagcacgtcccgaaggggctgacataagtcggtgaatgagccactggttactattatgcagtaactgtgccaataaagaaaatagtttggtaacgtactgattatacgttgctttgaggggtttatgtctcctccgctgtttgaatgtaaatcagccactgtgtcgctaaaaagagacaacttaagataaacttattagataatattaaaatcaatgagttaagtgtcgccagaaagcgacacggcaaaccacccattgtcgtgatttacagacacaaaaaagctcccggagttgggagcttatgatagtggttggtgcttaatgccgcatccgggctgcaaaaccaatgggctgacgacttaccccaactgcttacgcgcattgcggaaaatgcgcatccatgggccatcctcgccccagttttccggatgccaggagttgctgacagtacggaaaacacgttccgggtgcggcatcataatggtgactcgaccactttcagtcgtgactgccgtaataccgttcggactaccgttcgggttagccgggtaggtttcagtgactttgccgaagttatcgacatagcgcagtgccaccagccctttgctttccagtgccgccagatgcgccgcatcacgcacttccacgcgcccttcaccatgagagacagcaatcggcatttggctgcccaccatcccctgcaacagcagagacgggctttgggttacttcaaccaggctgaaacgcgcttcaaagcgatcggaggtattgcgcacaaaacgtggccacaactcactacctgggatcagttcacgcagattagacatcatctggcaaccgttacatacccccagcgccagcgtttgcggacggtggaagaaggttgcaaactcatcgcgtacacggtcattgaacaggatactcttcgcccaaccttcaccggcacccagcacatcaccgtaggagaaaccaccgcacgcgaccagggcgtggaaatcttccaggcccgtgcgtccggtcagcaggtcactcatatgcacgtcgatagcatcaaagcctgcacggtggaaagctgccgccatttcaacatggctgttcacgccctgctcacgcagtacggcaactttcggacgtgcgccagtggcaatatacggtgctgccacatcttcgttgatatcgaagctcagttttacattcaggcccggatcggcgtcgttagatttcgcctgatgctcctgatcggcacactccgggttgtcacgcaggcgctgcatctgccaggtagtttctgcccaccagacacgcaacgtggtgcggctttcgctgaatacagtctgcccgttggcggtaatcacaaaacggtcaccggaaaccgcctgccctacataatggacacaatcagcaagcccatgctgtgccagtacggactcgaccgcttcacggtcagcggcacgaacctgaatcaccgcacccagttcttcgttaaacaacgccgccaggcgatcgtcacccagagtggcgatatccgcgtcaatgccacaatgaccagcaaaggccatttccgccagcgttaccagcaggccgccatcagagcggtcgtgatacgccagcagcttacgctgtgcaaccagcgcctgaatcgcgtcatagaagcctttcagttgcgcgacatcgcgtacatctgccggtttgtcgccaagctgacgataaacctgcgccagcgccgttgcgcccagcgcgttattgcctttgcccaaatcaatcagcagcagtgcgttatcttcggtagaaagctgcggcgtgatggtgtgacgtacatcttccacgcgggcaaatgcagaaatcaccaggctcagcgggctcgtcatttcgcgctcttcgttaccttcctgccagcgggttttcatgctcatggagtctttacccaccgggatcgtcaggcccagcgccggacaaagctcttcgcccacggctttaacggcttcatacaggcccgcatcttcaccagggtggcctgccgccgccatccagttggcggaaagtttgatgcgtttgatatcgccaatttgtgttgcggcgatgttggttaacgcttcaccgaccgccagacgggcagaggcggcgaaatccagcagcgcaaccggcgcacgctcgccaatcgccatcgcttcaccgtagtagctgtcgaggctggcggtagtgaccgcgcagttagcgaccggcacctgccacggccccaccatctgatcgcgcgctaccatgccggttacgctgcggtcgccaatggtcaccaggaaggttttttccgccacagtcggcagatgcagcacacgtttcaccgcgtctgcaatggtgatcccttcacgggccagcgcgtcgcctttcgctttcagcgtttgtacatcgcgggtcatcttcggcgttttaccaagcaggacgtccagcggcagatcgatcggctgattatcaaaatgacgatcgtgcagagaaagatgcagttcttcggtcgcttcaccaatcaccgcgtagggtgcgcgctcacgcttacacagttcgtcaaacagcggtaattgatcggcagcaaccgccagcacgtagcgttcctgggattcgttacaccagatttccagcgggctcatgcccggttcgtcgcttagaatctcgcgcagttcaaatttaccgccgcgcccgccgtcgctcaccagttccggcatggcgttagaaagaccgccagcgccaacgtcgtggataaacaggattgggttggcatcaccaagctgccagcaacggtcgatcacttcctggcagcgacgctccatctccgggttgtcgcgctgtacggaagcaaagtcgaggtcggcatcagactgaccagacgccatagaagacgctgcaccaccgccaagaccgatgttcattgccgggccgccgagaacgaccagcttcgcaccgacgttgatctcgcctttttgtacgtgatcggcgcgaatgttgccgatcccgcccgccagcatgatcggtttgtgataaccgcgcagctcttcgccgttgtggctgttcactttttcttcataagtacggaagtagccgttcagtgccggacgaccaaattcgttgttaaacgccgcgccgcccagcgggccttcggtcatgatgtccagcgcggtgacaatgcgctcaggcttaccgaaatcttcttcccacggctgttcgaagccaggaattcgcaggttggaaacggagaaaccaaccagacccgctttcggctttgcgccgcgcccggtggcaccttcatcgcggatttcaccgccggaaccggtcgccgcgcccggccacggagaaatcgccgtcgggtggttgtgagtttcgactttcatcagaatatgcgccggttcctgatggaaatcgtagcggcccgtttcgtggtcagcaaagtagcggcccacttcagaaccttccattacggcggcgttatctttataagcagagagaacgtgatctggcgtggtttcgaaagtatttttgatcatcttgaacaggcttttcggctgctgttcaccatcgataacccagtcggcgttaaaaattttgtggcggcagtgctcggagttcgcctgggcaaacatatacagttcgatgtcgttcgggttacgaccaagctttgtgaaagcatcctgcagatagtcaatttcatcttccgccagagccaagccaagacgcaggttagcgtcgatcagcgcctgacggccctgccccagcaaatcaacgctggtaaccggagtcggttgatggtgggcaaacaactgctctgcatcatctaaagcaaaaaagaccgtttccatcatgcggtcgtgcagttcagcggtaacctgctgccattgttcattggtcagcgtaccggcttctatatagtaagcaacgccgcgctcaaggcggtttacctgttgtagcccgcagttatgggcaatatcggtcgctttgctagaccagggagagatggtgccaggacgcggggtcaccagcaggagtttgccttgcggggcgtggctggcgagtgccgggccatatttcagcaggcgttcaagttgtgcgtgctcatcatcgtttaacggcgcattgaggtcagcaaaatggacatactcggcgtaaatattgtgaaccgggagcctggcagcctgaaaacgtgccagcagtttgttgattcggaatgcgctcagtgcagggctaccacgcagaatttccatcataagtctctcgtcttctaagctttcggtgtacccaagggggggaaacgggcgtcattataaagaatctgatgcgctgacgaaaccgtttgcgtggaaataaaatcaccatcgtgaattagcaacgcgtgccgccaatggctgtaataagttgccatctggcgcaggtttacgcaaaatgccgctcatttatgagtaaacctttcactattattacgttttttcaagctgggacgcgcacgacacagagaattaactaattgaaaaaattaaagattaattatctgttcatcggcattctggcactgctgctcgcggtcgctctctggccatccattccctggtttggtaaagccgacaaccgtatcgccgccattcaagcgcggggagagttgcgtgtgagcaccattcatactcccctgacttataacgaaatcaacgggaaaccttttggcctggattacgaactggcgaaacagtttgccgattacctcggcgtaaaactgaaagtgaccgtgcggcagaatatcagccagctgtttgacgaccttgataatggtaacgccgacctgctggcggcaggacttgtctataacagtgagcgggtaaaaaattatcagcctggccctacctattattccgtgagtcaacaactggtttataaagtgggtcagtatcgcccacgtacgctgggcaacctgacggcggagcaactcaccgttgcaccgggtcatgtggtggttaacgatctccagaccctgaaagaaacaaaattcccggaattaagctggaaggtagacgacaaaaaaggctctgcggaattaatggaagatgtcatcgaaggaaaactcgattacaccattgctgattctgtcgccatcagcctgtttcagcgcgttcacccggagctcgccgtagcgctcgatatcaccgatgaacaaccggtgacttggtttagcccgttagatggcgataataccctttccgccgccctgctcgacttcttcaacgaaatgaatgaagacggtacgctggcacgcattgaagagaaatacctggggcatggcgatgattttgattacgtcgatacgcgcacatttttacgcgccgtcgatgcggtactgccgcagttaaagcccctgtttgagaaatacgccgaagaaattgactggcgtttgctggccgctattgcttatcaggaaagccactgggatgcacaggccactagtccgacgggtgtgcgcggcatgatgatgttaaccaaaaataccgcgcaaagcctcggcattacggatcgtaccgatgccgaacagagcatcagcggtggcgtgcgttatttgcaggatatgatgagtaaagtgccggaaagtgtgccggagaacgagcggatctggtttgccctcgctgcgtacaatatgggctatgcgcatatgctggatgcccgcgccctgacggcaaaaaccaaagggaatcctgacagttgggctgacgcaaaacagcgtctgcctttacttagccagaaaccctattacagcaagctgacttacggctacgctcgtggacatgaagcctacgcttatgtcgaaaatattcgtaagtatcagattagcctggtgggttatctgcaagagaaagagaagcaggctacagaagcggcgatgcaactggcgcaggattatccggcggtaagccctacggagttgggcaaagagaaatttccttttctcagctttctttcccagagcagtagtaactatttgacccattctccctctctgctgttttccaggaaagggagtgaagagaaacaaaattaatccgtgctggattgcgcttttttctgcgctttaatttcctggcggcgcatgcgaaagaagtcactgagcaacgccgcgcactcatccgccagtattccttccgtaatttccactcggtgattcatacccggatgatgcagcacatccattaaagatcccgcagcgccagttttcgcgtcacgcgcaccaaagaccacgcgaccaatgcgactgtggatcatcgctccggcacacattacacatggttcaagcgtgacatacaacgtggcgtcgatcagacgataattttgcatcaccagaccaccctgccgcagggccatgatttctgcatgtgcggtgggatcatggcgaccaatcgggcggttccagccttcgccgattacccgattgttatgcactaataccgcgccgaccggcacttcccgctcatcccaggcacgtttcgccagcgtcagcgcgtgacgcatccagtattcgtggctaaattcgacttcagacaaaaagaaaactccggttataaaagcgcggcgcattatacacggacgctatgctttactttattccagttgctggagttcaccgcgcggggttactcgccaacgatgctgacagaaataaagcagcggattgtcctgattactgtcgctatagccactgtacagccgcagcggagtgccgattttgcgctccagttgtgcgaccttttcatgtcccagacaacgcatcgtcaatacccaaccaccatagccacgctgaatttggctggcgataagattaacccgcggcagccagggcgtatcgaaataaaccgcttcaaccagcggctgcggagagccggtaatcaaccagatatcagcatcggaacttaacaggtaggtggttaatcgctcctgaaccagcggaaaggcggtaacattgtcgcgaaaccagcgcacgaaatcggcctgcaacgtctgtaaacgtgcttcgctgtgaccaaaagtgcacccccacagaagcagactcatcggccagcgtgccgcacgaccttttatcaataacgcaatggctataatcggtaacaacggcaggacaagtaacgcattcagcggttggcgacgtagtaaatagcgcagaaaactgccgaacatatcctgctgatgcaatgttccatctaagtcaaaaaacaccacacgacgctcgtgagttgccaaaccatattcctctggactgaaacatcctgattaattttcgctactacatagcctaacagatagatcatcacttttccggcaacaatcgaccgcatcatggctaactggaatttttaattcatggcaattagcggcaatggaatataaaattcactcgcgtgtgtctcatattgcctgttgtcgccactatttcatcgcgaggaaagatatgaacggcttacttcgtatccgtcagcgttaccaggggcttgcccagagtgataaaaaactggcggattatctgctgctacaacctgatacggcgcgccatttaagctctcagcaactggccaacgaagccggagtcagtcagtccagcgtcgtgaagttcgcgcaaaaactcggctataaaggttttccggcgcttaagttggcgttgagtgaagcgctggcaagccagccggaaagtccctccgtgcccattcataaccaaatccgcggtgatgatccgttacggctggtcggcgaaaaactaattaaagaaaatactgccgctatgtacgcaacgctaaacgttaatagtgaagagaaactgcatgaatgcgtaacaatgttgcgctctgcgcggcggataattctgaccggtattggcgctagcggtctggtggcgcaaaactttgcctggaagctgatgaagattggcttcaatgctgccgcagtgcgcgatatgcatgcgctactcgcaacagtacaggcgagctcccctgacgatctgttattagccatttcctacaccggtgtacgacgcgagttaaacctggcggcagatgagatgctgcgagtgggcggaaaagtgctggcgattaccggctttactccgaatgccctgcaacagcgtgcttctcattgcctgtataccattgccgaagaacaagcgacaaacagtgctagtatctctgcttgtcacgctcagggaatgttaacggatttgctgttcattgcgctgattcagcaggatctggaactggcaccagaacgtattcgtcatagtgaagcgctggtgaaaaaactggtctaagtaaagaatgcgcgtataatgcccgcccggtttgtgttgttttgagagtttccttatggcgttgttaatcactaaaaaatgcatcaattgtgatatgtgtgaacccgaatgcccgaatgaggcgattagtatgggagatcatatctacgagattaacagcgataagtgtaccgaatgcgtagggcactacgagacaccaacctgccagaaggtgtgcccgatccccaatactattgtgaaagatccggcgcatgtcgagacagaagaacagttgtgggataaatttgtgctgatgcaccacgcggataaaatttaatattctactctggaagtagagtattaattatattactgggaagccttaacgccattatatttatttaattgatgacattagcataatcattcactaagttaatttatatagtatctgcccagacacttatttatagttattaaaggtgcgtccgactggttcaccggacgcaccttaagtacgtttccttgtgttataagaacagaaggatcagctgtaaaacagcaatgatgattttgatgacccgtttaatcaggtatcggcaatcagtcattcgtttttccttaaacaaggaatgcagccattcagattagcccttacatctccccaaaactgaacgtgcgagttattgagggtgcatgctgcactccacaccagagctttgacgacaccactcgtttcaatgggggaattctgtggcatggtgtaaagcacagcaaaatcttcaataacgaagccaattttaatgtacttacgaattggcggtcacgttaatctttccatcaatattgctttcttcgtaaaggctcgagtttttatgctaaagattgcaagttgcttgtaaaagataagtacactgatccataatcgctgttgttgagggtgcatgctgcacaaaattaaagttaaaaagtaaaacccccgttccttaccagttcgggggttttactttttaaagagaacggtattatttttaactttcaataattaccgtggcacaagcatagtgccgctcatctgccagcgttacatgcatatttgcaacgcccagcttttccgccagttttaatgcctcgccccatagccgtagccgtggtttgccgagctcatcattgaatacttcaaattgattaaacgccagaccattgcggatcccggtgccaaacgcttttgctgcggcttctttcacagcaaaacgcttcgccagaaaacgcaccggctggtggtgcgttttccagatagcccattcgttatcgcttaatacgcggcgtgccaggcgatcaccggatcgggcgatcaccgcttcgatgcgagcgatctccacaatatccgtgcctaaacctaatattgccattagccacgcgcttccagcatcagacgcttcatttctgccaccgcatctttcagtccggtcatcactgcacgaccaataatggcatgaccgatattcagttcatgcatctcagggatggcggcaatggctttcacgttgtgataggtcagaccgtgtccggcgttaactttcagaccgaggcttgcggcaaaggtcgcggctttggcgatacgcgccagctcttgcgcctgttcggcgtcagttttggcatcagcatagcaaccggtgtggatctcgataaacggtgcgccaacctctgccgcagctttgatctgctcttcatcggcgtcaataaacagagaaacctgaatcccggcatctgccagacgtttgcaggcatcgcgcattttgtcacgctgccctgcgacatccaggccgccttcggttgttacttcctgacgcttttccggtaccaggcagcaaaaatgtggcttcgtctcaacggcgatcgccagcatctcttcggtcaccgccatctccagattcatgcgggtatccagcgtctgacgcaggatgcgcacgtcgcggtcagtaatgtgacggcgatcttcacgtaaatgcacggtaatgccgtccgctcccgcctgctcggcaataaacgcggcctgcaccggatccgggtaagcggtaccgcgcgcgttgcgcagcgtagcgatatggtcaatgttgacgcctaacagtaattcagccatgacaatcctcatcattcataatgtgttttcaccgttcgcttaggcataaactgccggaacagttccctgctctttaaaggtttaccgccaagatacggcttaagcgccatgcgggtaaagcgtttcgcggcgcgcagtgtgtctgcgtcaggaaattcccgtgcgtttaacgcttttaactgccttccggtgaacgttttattgtcgataacgacgcttgcgataaaccctttttcttcgcgataacgatacgtcatggtgtcatctaccggctcgccgctacccgcacaatgggtaaaattgacgccataacccagatgcccgagcagtgccagttcaaagcggcgcagcgcgggttctggcgtaccagtgacccctgcaagagactgaatgcagtgcaagtaatcgaaaaaaagttcagagaagcgcgtctcgtattccagtacgcgggagagaagttcgttgatgtacagaccgctgtaaagcgtgataccgcttaatggcagcgccaggctgacggcttcagcactgcgcagcgttttgacttcgccacgcccgccaaaacgtagcaagagaggggtgaaaggctgtaatgcacctttcagggtagagcgtttagagcgtgcgcctttggcaaccagacgcacgcgcccgctttcctccgtgaagacgtccagcatcaggctggtttcgctccacgggcgactatgcaggacaaatgcgcgctgccagccttccatcggagttactcttaaagatcgtcaacgtaaccgagactgcgcagtgcgcgttcgtcgtcggcccaaccggatttcacttttacccacagttcaaggtgaacaggcgcttcgaacatttcctgcatgtctttacgcgcttcaatcccgatggttttgatcttggcccctttgttgccaatgaccatcttcttctgcccttcacgctcaacgagaatcaaaccgttgatgtcataaccaccgcgttcgttagagacgaaacgttcgatctccacggtcacggagtacggcagttcagcgccgaggaaacgcatcagtttttcgcggatgatttcagacgccataaaacgctgactgcgatcggtgatgtaatcttccgggaagtgatgagtcgcttcaggtagatgcttacgcacgattgccgcaatagtgtcaacattcagcccggtttcggcagagattggcacgatatcgaggaagttcatctggcttgccaggaactgcaggtgcggcagcagatcggctttctcctgcacgttgtccactttgttcaccgcgaggattaccggcgctttgccttcgcgcagtttgttgagcaccatttcgtcgtccggcgtccagcgggtgccttcaacgacaaaaatcaccagctcaacatcgccaatagagctgctcgccgctttgttcatcaggcggttaatggcgcgtttttcttccatatgcaggcccggtgtatcgacgtagatcgcctgatacgcgccttcagtatggatccccacaatgcggtgacgagttgtctgcgccttgcgggaagtgatggagattttctgccccagcagtttgttcaacaatgtggatttgccaacgttcggacgtccgacgatggcaataaatccgcagtaacttttatcgatgctcattccagctccagttttttcaacgcctgttcggcggcagcctgctcagccttacgacggctactacctgtgccaaccaccggttcactcaggccgctgacctggcagtggatagtaaattcctgatcgtgcgcttcgccacgtacctggactaccagataagtcggcagcggcagatggcgaccctgcaaatattcttgcaagcgcgttttcggatctttttgtttatcgcctgggctaatttcgtccaaacgagtttgataccagttgaggattaatttctcgacggtttgaatatcactgtcgaggaatacgccaccaattaatgcttcgacggtgtcggcgagaatactctcacgacgaaatccaccgcttttaagttcacctggccctaaacgtaagcactcgcctaactcaaattcgcgcgccagttccgccagcgtattgccacggaccagcgtggcgcgcatccggctcatatcgccttcatccacacgagggaaacggtgataaagcgcattggcgataacgtagctcagaatagagtcgcctaaaaattctaaacgctcgttatgtttactgctggcactacgatgagttaatgcctgctgcaacagttcctgatgattaaaagtgtagcccagcttccgttgaagccgattaattacgatggggttcatgcgataccaataaataaatgcgtcaacaattcagcacacgaaacagacctgatatacatggttctgctaactgcttcgctgcagtttcagtttaccggtatatggggaccaacgctgtttcgtgtgccgtggcaacctggaggtgccaaccttaaacttcgggggaatattctatacacaacgacgggggatgtcgttagccacgggagatttatctcataaataattcacgttgtcgccataacggcgacaacgtgaacgaagatggctattaatggatgccgccaatgcgacttaagcgcagaccagtcggccattcgccttcttgcttatcgaagctcatccagatagccgttgcccgaccgaccagattcgcttccggcacaaagccccagtaacggctgtccgcgctgttgtcgcggttgtcgcccatcatgaagtattgtcccggaggaacaatccaggttgccagttgttgccctggctgctggtaatacatccccacctgatcctgcgcaatcggcactgtcagaatgcggtgcgtcacatcacccagtgtctctttacgctcggaaagacgaattccattttctttggtttcgtttttcggcacttcaaagaatccgctggtcgcttccccaccattacggcgactgaaggtctgaacgaaatcgctcggttccacgttactgtaggtgaccggcagcgcgttttcacacgcctggccggaactgcatcccggttgaatcgtcagctctttactgaccggatcgtaagtgactttatcgcccggtaaacccaccgcgcgcttgatgtaatcaagctttggatcttccggatatttaaagaccacgatatcgccgcgtttcggatgaccggtttcgatcagcgttttctggtagataggatctttaatgccataagcaaacttctctaccagaataaaatcaccaattaacagagtcggcatcatgctaccactcgggatctggaacggttcataaataaagctacgcacaatcaatacgatagccagtaccggaaaaacagaagcaccggtttccagccagccaggcttcggcgcaacctttttcaacgttgctttatccagactgtccccggcagccgcctgcgccgctgcctgacgttcccgccgtttaggtgcgaaaaagaatttatccacgcaccataaaatgcccgtcaccagtgtggcaatcaccagaatcagggcaaacatattcgccatgccaactcctaagggttatttgttgtctttgccgacgtgcagaatggcgaggaacgcttcctgcggcagctcgacgttaccgatctgcttcatgcgtttcttaccttctttctgcttctgcagcagctttttcttacggctgatatcgccgccataacatttagccagtacgtttttacgcagctgtttcacggtggatcgcgcaatgatgtgcgtaccaatcgctgcctgaatggcgatatcaaactgctggcgtgggatcagatctttcatcttctccaccaactcgcgaccgcggttttggctattatcacggtgggtgatcaacgccagcgcatcaacacgttcaccgttgattaatacgtctacacgtaccatgtcggacgcctggaagcgcttgaagttgtaatccagagacgcataaccacggctggtagatttcaggcgatcgaagaagtcgagcaccacttccgccatcgggatctcgtacgtcagcgccacctgattaccgtggtaaaccatattggtctgcacgccgcgtttttctacgcacaacgtaataacgttgccgagatatgcctgcggcagcagcatgtgacactctgcaatcggctcgcgcagttcgtagatgttatttaccgcaggcagcttggatgggctgtcgacgtagataacttctctactcgtggtttcaacttcatacactacggtcggcgcagtggtgatcagatccagatcgtattcacgttccagacgttcctggatgatctccatgtgcagcaggccgaggaagccgcagcggaaaccaaagcccagcgcgctggagctttccggctcatagaacagactggcatcgttcaggctgagtttacccagcgcgtcacggaaggcttcatagtcgtcggaacttaccgggaacagaccggcgtatacctgcggtttgactttcttaaagccaggcagcgccttttctgccggattacgcgccagcgttaaggtatcgccgactggagcgccgtggatatctttaatcgcacatacgagccagcctacttcgccacatttcagttcagtgcggtcaacctgtttcggcgtgaagatgcccagacggtcggcgttataggtctgcccggtactcatgactttcactttgtcgcccttacgcagggtgccgtttttaatacggataagactaacaacgcccaggtagttgtcgaaccaactgtcgataattagtgcctgcaacgggccttccggatcgccttccggcggcggaatgtcgcgcaccagacgttcgagaacgtcctgcacaccaacgccggttttcgcactacagcgcaccgcgtcggtggcgtcgatgccgacgatatcttcaatttcttccgccacgcgttcaggatcggctgccggcaggtcaatcttgttcagtaccggcacaacttcgagatccatttccatggcggtgtagcagtttgccagggtttgcgcttctacgccctgcccggcgtcgaccaccagcaatgcaccttcacaggcagccaggctacgggaaacttcataggagaagtctacgtggcccggggtgtcgataaagttaagctgataggtttcgccgtcagacgctttgtagtccagcgtcacgctttgcgctttgatggtaatgccacgctcacgctcaagatccatggaatcgagaacctgcgcctccatttcacggtcagacaggccaccgcagatctggataatacggtcagacagcgtgcttttaccgtggtcaatgtgagctatgatgctaaagttacgtatattcttcataaagtatgattattgtgccttaatgcccggttaaccaggcttttagaagtcgctgttctgagcttaacgtctgtattaatagaaacgccgcattctacactacaacattgaggcgaggaaatgttcataccgtatggattgtggtatctggaaacgtcctcgcatttgttatgcaaaatgcaacaaagccagtgaaatcactggctcgcgtcttcgctagatgtttcaaatcgcacaaggccaggcggcaatgccacgcttaagatgatcggttgccattctgcccgggcagcaaacttacggctgtagccgcgcgcaatcaggaacccgccaataccaccgaggatcgcaccacataatgctgcgacgtcagaagcaaagagtagctgaaataggctagcgataaggaataatcccaccagcgggctcatataaaccagtaatgcggagctaagcaggctgccttcggcgatccccaattccactttttgccccggcactaacggctcatcacagggtacgacaatggtatgcgtggtttgcgggccaagtttatttaacacgcggctaccgcaaccggcgcgactagcgcagctgctgcaactagctttaacatcacaactgaccagcgcctgcccgttttgccaggagacgacggtagcccactctttgatcattgcgctgccccgaacttaatattctcggcaatgcgtttcgccgtttgcggcggcagttcaccgacaatggtgatttcggcgttatcacgtacgcttgtactgacggttctgcgtccggtgcgcaacatctgatcggtgctgcttggcgtagcgcggttaacgtttacgctgaagctgaataatccgtcggaatagagacgactttcgataggcatgttgtccatcgtcggtagcggacgtcgactactggaaacttcgctaaaaccctgtggcaaccaggttggcgtccagctgaatttagctttttcacctacaggaacagaaagcaacggcggcaaatttgccttcgccagcgtctgcatactgctgctgatatcctgattgacgttaaaagcaatcacgcgaaattgttccagcgtttcaccatcgcgatcaaggagatcaacccgcatcggtaatttgctttcggtgtccatccacacgatgtagctgtagcgtgtaccatctcgggcaaccacgcgaatgacttcgcaaagacgatcagcaatacgcgtgcgcccgacggagataaagtcgtagtaaggagaaaggcgtttgaaatcggtatagataaggcttggcagagaatcaacaatgtaatcgccattaagcgtgaacggttcaagtcccggttcaaaatagctgatttcattgccgcgctgtaccacttcccggcgcgggccatccatttgcaacaattgtgcaagaggacggttatcgaggcgtgcatgtcgataacgcagagactcaacaccctgtttattgatgctgatgaaactcagctcgtaattcagactctgactggccaggttcatctgctgtaataacgccccggacgcgggagtggcgctggcgttagcagagaataacaggctacctgtcactaaactcatggcaaaccaaagttgcttcattactggctttgcgttcctaaagtttgaattcctggcacctgtacagcggcttgctgggtttgcgcctgctcaaactgaagctgttcagagtggagtcggcgttgcagttcgtaatcctgcaacattgcattaatgcgacgacgctgctcctgtacctgctgctgttgaccattgtttgcggtcgcttcagaaggtactcccaggcttaccgggctggctttacccatcatcggcagtgtattaaataccggcgtttcgggctgctgggacgtttcagattgtccattatagtgctggacgccaacgataactgcaaggcttacgcatgcggctacgcccatttgggtaagctgtgccgcccacggacgtactttctgccagaatggcattttctgccattgatgcggcgcaggctgggcttccgggatcaatgtcgccggttgacgtactggctcttcttcaatggcggccatcacgcgactagagatatcgaaatggagcacctcgggagtatcaccccgcatactgtcacggattaagtgatagctttcccaggttttctgcatttctgggttatgagccagttcgttaagcagctcactatccagcgtttcgccatccattaaagcggaaagttgttctttctgcatgcctaatacccttatccagtatcccgctatcgtcaacgcctgataagcggttgaactttgttatcaatagcttccctcgctcggaagatacgactacgcaccgtacctaccggacaatccatgatagcggctatctcttcatagctcaggccatccagctcccgcaaggttattgccatgcgtaaatcttccgggagggactcaatagttcggaaaactatctgtctcagttcttcactcaacattaagttctcagggttgctaatttctttcaacgcgccgccactttcgaagttttcagcttcaatggcatccacatcactggaaggtggacgacgcccctgagcaaccaggtaatttttcgctgtatttacagcaatccgatacagccatgtataaaaagcgctatctccccggaagctatccagcgcacgataggctttaataaaagcttcttgtaccacatcgggaacatcaccgctcggcacatagcgggaaaccagactcgccactttatgctgatagcgcactaccagtaagttaaaggctttctgatctcccttctggacccgttcaaccaggacctggtccgttaactgctcgctcatccgaggtaaagtctccccaaaccaaatttccacgcgctatcgaaacgccactccattagctgcaatttgagcaagcaaagggttagagtgtctcgtttttgtaaagttccgtaacgcatctgtttttgtttgtcatgctgtagacggatcattatctatcattataagtctacagaatctgaacatcgcattatctgtgtagaaatgcccatttaactgcctgaagagtaacccaacggcctttttatttcaccacctaatcctccaccagccagtaacttctctttttctcgccgccctgcgtcagcgtgtttagcaactgtaacaaatattaaaatagcaggtgtttatccgcacaacatgatgctatgctgaccaaaccatgtttagtaaattaaacaaagaaaatgaatactctccctgaacatagttgtgacgtgttgattatcggtagcggcgcagccggacttagtctggcgctacgcctggctgaccagcatcaggtcatcgttctaagtaaaggcccggtaacggaaggtagtacattttatgcccagggcggtattgccgccgtgtttgatgaaactgacagcattgacagccatgtggaagacacattgattgccggggctggtatttgcgatcgccatgcagttgaatttgtcgccagcaatgcacgatcctgtgtgcaatggctaatcgaccagggggtgttgtttgatacccacattcaaccgaatggcgaagaaagttaccatctgacccgtgaaggtggacatagtcaccgtcgtattcttcatgccgccgacgccaccggtagagaagtagaaaccacgctggtgagcaaggcgctgaaccatccgaatattcgcgtgctggagcgcagcaacgcggttgatctgattgtttctgacaaaattggcctgccgggcacgcgacgggttgttggcgcgtgggtatggaaccgtaataaagaaacggtggaaacctgccacgcaaaagcggtggtgctggcaaccggcggtgcgagcaaggtttatcagtacaccaccaatccggatatttcttctggcgatggcattgctatggcgtggcgcgcaggctgccgggttgccaatctcgaatttaatcagttccaccctaccgcgctatatcacccacaggcacgcaatttcctgttaacagaagcactgcgcggcgaaggcgcttatctcaagcgcccggatggtacgcgttttatgcccgattttgatgagcgcggcgaactggccccgcgcgatattgtcgcccgcgccattgaccatgaaatgaaacgcctcggcgcagattgtatgttccttgatatcagccataagcccgccgattttattcgccagcatttcccgatgatttatgaaaagctgctcgggctggggattgatctcacacaagaaccggtaccgattgtgcctgctgcacattatacctgcggtggtgtaatggttgatgatcatgggcgtacggacgtcgagggcttgtatgccattggcgaggtgagttataccggcttacacggcgctaaccgcatggccagcaatagtttgctggagtgtctggtctatggctggagcgcggcggaagatatcaccagacgtatgccttatgcccacgacatcagtacgttaccgccgtgggatgaaagccgcgttgagaaccctgacgaacgggtagtaattcagcataactggcacgagctacgtctgtttatgtgggattacgttggcattgtgcgcacaacgaagcgcctggaacgcgccctgcggcggataaccatgctccaacaagaaatagacgaatattacgcccatttccgcgtcagtaataatttgctggagctgcgtaatctggtacaggttgccgagttgattgttcgctgtgcaatgatgcgtaaagagagtcgggggttgcatttcacgctggattatccggaactgctcacccattccggtccgagcatcctttcccccggcaatcattacataaacagataaaaagcctgggtcagcgccgtatacgcttcggaatagttctggtctggcccacgaatgactaagcgatcgctaaagcattctcccgcctgcggggagaatgccagcagcacccgatgcggcagtcgcgcttcgttttccgccacatccgtccgcaaacgtaaatgccagcccatgcttaatgccagctccgtaaaaccattaccaatctgctctggcagcactacgcagaaaaatccctcttcggtaatgcactccgccgcacaggtcagcaagcttgggtgatcaagcgtagtggtatagcgagcctgttcccgttgaggtgtgctgcactctactccctgctgatagtaaggtgggttactgatgattaaatcgaagcgtactgtctgctgtgtaatccactgctgaatatccgccgtatggacgttaatccgctctgcccacggggactggttgatattttcctgcgcctgcgcggcagcttcactttccagttcaactgcatcaatcatcacgctgtcatcggttcgctgcgccagcattaatgccagcaacccgctacccgcgccgatatcaaggcaacgttttaccccagccaccggtgcccatgcgcccaataaaataccatccgttcccactttcatcgcacagcgatcgtgagcaacaaaaaactgtttaaaagtaaatccattacgacgaagcacggatgtagactgactcatgaaaataaaaccttgcaggaaaaacggcgatagcaccgggtgagaacaatacccgagaagcgatatccatacaaacagatgaagattgcagccgtaacgtctataatcagcgccccacacagaggtagaacatgactgtaacgactttttccgaacttgaactcgacgaaagcctgctggaagccctccaggataaaggtttcactcgcccgaccgccattcaggctgccgccattccgcctgcgctcgatggccgtgatgtactcggttctgcgccgacaggcaccggtaaaacggcggcgtatctgctgccagcgttgcagcacctgctcgatttcccgcgtaagaaatccggtccgccgcgtattttgatcctcaccccaactcgcgagctggcgatgcaggtgtccgatcatgcccgcgaactggcgaaacatacgcatctggatatcgccaccatcaccggcggcgtagcctatatgaaccacgcggaagtgttcagcgaaaatcaggacatcgtggtcgccacgaccggacgtctgctgcaatacataaaagaagagaacttcgattgccgcgcggttgaaacgctgatcctcgacgaagcagaccgtatgctggatatgggcttcgctcaggatatcgaacatattgctggcgaaacgcgctggcgtaaacagaccctgctctttagcgcaacgctggaaggcgatgcgattcaggactttgccgagcgtctgctggaagatccggtggaagtttctgccaatccctccacccgtgagcgcaaaaaaattcatcagtggtattaccgcgccgatgatcttgagcataaaaccgcgttgctggtgcatctgttaaaacagccggaagcgacccgcagtattgtgtttgtgcgtaagcgtgagcgtgtgcatgagctggcaaactggctgcgcgaagcgggcatcaacaactgctatctcgaaggtgagatggtacagggcaagcgtaacgaagcgatcaagcgtttgaccgaaggtcgcgtaaacgtactggtcgcaaccgatgttgccgcgcgcggtatcgacattcctgacgtcagccacgtctttaacttcgatatgccgcgcagtggcgatacttatttgcaccgtatcggacgtaccgcgcgcgccggtcgtaaaggcaccgcaattagcctggtggaagcccatgaccatctgctgctgggtaaagtaggccgctatattgaagagccaattaaagctcgcgttattgatgagttacgcccgaaaacgcgtgcgccaagcgaaaagcagaccggcaagccaagcaagaaagtactggctaaacgtgctgagaagaaaaaagctaaagagaaagagaagccgcgggtgaaaaaacgccatcgcgacaccaaaaatattggtaagcgccgtaaaccaagcggaacgggcgtgccaccgcaaacgacagaagagtaatctcaatgccaggtttaagcctggtattaaaagtgctggcaaacgcaaaactgcctgatgcgctacgcttatcaggcctacgtggctcatgcaatatattgaatttgcacgatcttgtaggccggataaggcgttcacgccgcatccggcatgaataaagcgcactttgtcgacaagttaaatgccgggtttaatcccgacattatttttatccagccacaaaactctcttcaacacactgaataaaagtgtgcatcgccgggctaaccgcttttccagcatgatgtgcgcacatggccgtaatggtctggctctgttcgccaaaaggcaattcaattaattctccgcactccaactcttttgccaccgcaaagcgcggtaggtagctgaccccgatattcgccgcgacacaacgcttgatgctttcgatacttataagctcaatggtgttttccaccgtgatccgccgctgacgcagcgtgctctcaaatatctgccggaagacacattgcggttcgttgataataaagctacaggcgttatgtcttcccggctcagtaaaatcgacatctgcaatttgcggactagccaccagcaccagactttgttcacccaactctcgtcgattcagagcatcatcattccctacacgataaaagacgccaacatcggcctcatcattcagtagcgcatcacggatcacgtaacagttcaggctctgcaagcttaaacgcacttttggggcgcgttgccgaaaacgctgcaacacctgcggcattcggtaagagagcaacgtttcgccgctaacaacgcgtagttccccgtccggatcactctcctttttggcagcctcacgaagcgtatccatcactcgggtaagttcataaatgtgcggcagcaacttttttccttcgcgggtaaggcacatccgtcggccaattttctcaaataactggacactaaactcctgctcaagctgctgaatatgaaaagtcaccgtgctttgtgtacagcacaatttttggctagctcgcaaaaaggaaccctcttccaccacggttttaagcgtaataaaacggcgcagatccataaccccaaacctatcgaaaatatcgaatctagaatataaaaacattcatttttttaaatgttccgtgtcgggtactgtctaccaaaacagaggagataacaagtgacaccgacccttttaagtgctttttggacttacaccctgattaccgctatgacgccaggaccgaacaatattctcgcccttagctctgctacgagccatggatttcgtcaaagtacccgcgtgctggcagggatgagtctgggatttttgattgtgatgttactgtgtgcgggcattagttttagtctggcagtgattgacccggcagcggtacaccttttgagttgggcgggggcggcatatattgtctggctggcgtggaaaatcgccaccagcccaacaaaggaagacggacttcaggcaaaaccaatcagcttttgggccagctttgctttgcagtttgtgaacgtcaaaatcattttgtacggtgttacggcactgagcacgtttgttctgccgcaaacacaggcgttaagctgggtagttggcgtcagcgttttgctggcgatgattgggacgtttggcaatgtgtgctgggcgctggcggggcatctgtttcagcgattgtttcgccagtatggtcgccagttaaatatcgtgcttgccctgttgctggtctattgcgcggtacgcattttctattaacgaaaaaaagcggaagaggtcgccctcttccgcttagtaacttgctacttaagccttacaggctttcagtaaaggtacgagcgataacgtcgcgctgctgttccggagtcagagagttaaagcgaactgcataaccggatacacggatggtcagctgcggatatttttccggatgcttaactgcatcttccagagtttcgcgacgcagaacgttaacgttcaggtgttgaccaccttcaacgcgaacttctggtttcacttctactggaacttcacggtattcaatgtcacccagtttgcttactgcaaccacttcatcttctgcataacctgcttttgcaacgatgcaacgcgcttcgcctttttcgctgtccagcagccagaaagagttcagcagatcgtcgttagcggctttagtaatctggatacctgtaatcatgtgatgcctccccggcaaaattatttgatttgttcagcctgtcgcggccaattggtaaaaccattgttgcttgagtgtatatatactcctcaaacacccttgaatctttgatttaaatcaataaaaaccacacatcaagtatggtcgcaaatggattttattgttttacatcaacttatgcgggtgtgaaattttaccaatttacatttttttgcactcgtttaagtctaaaaaatgagcatgattttgttctgtagaaagaagcagttaagctaggcggattgaagattcgcaggagagcgagatggctaacgaattaacctggcatgacgtgctggctgaagagaagcagcaaccctattttcttaatacccttcagaccgtcgccagcgagcggcagtccggcgtcactatctacccaccacaaaaagatgtctttaacgcgttccgctttacagagttgggtgacgttaaagtggtgattctcggccaggatccttatcacggaccgggacaggcgcatggtctggcattttccgttcgtcccggcattgccattcctccgagtttattgaatatgtataaagagctggaaaatactattccgggcttcacccgccctaatcatggttatcttgaaagctgggcgcgtcagggcgttctgctactcaatactgtgttgacggtacgcgcaggtcaggcgcattcccacgccagcctcggctgggaaaccttcaccgataaagtgatcagcctgattaaccagcatcgcgaaggcgtggtgtttttgttgtggggaagccatgcgcaaaagaaaggggcgattatagataagcaacgccatcatgtactgaaagcaccgcatccgagcccgcttagcgcgcatcgtggattctttggctgcaaccattttgtgctggcaaatcagtggctggaacaacgtggcgagacgccgattgactggatgccagtattaccggcagagagtgagtaaatttgcggggaaatgccggatggcagagttgccacccggctgatttatcaggctttattctgacgccaccattcaccaagcaaaacgccggttgcgacagagatattcagcccggcaacgttgcccgtaccgtcaatcttcacgcgcagatcgttcggatcgcgtgcggcatccggtaacccttcatattcctgacccagcaccagtaccattttcgctggcagactagttttgaacagcggtttaccctgctcgctggaagtggtcactacggtgtaacctgcctgacggaaatcatccagcacgttaacaatgttgtcgccagtaatcggctgaacgtgctctgcgccgccttctgcggtacggatagccgccccgctctccagcagtgccgcatcctgcaccacgacacctttcacgccgaagtgcgcgcagctgcgcatcatgccacccaggttatgcgggttagattcgttttccagtgccagaacgcaatcctgcgcgcctgcctggcttacccactgctgcacggttgtaccgttacgctttttgatcaagaagcaaacgccgccgtgatgttccgtgccactcgcttttgtcaattccgcttcatccaccacatggtacgctttgcggtttgctgccatccagcgcaaagcttctttaaaacgcggcgttacactctggataaaccaggcgcgaacaatcgcttccggacggctctggaaaagtgcctgacatgcattttcgccgtagacgcgggtttcttccgcacgctgacgacgcaacacttccggatcaataaaacttttaccactgatgccaccgtgatcggccttttccggcgtctcatcacccggcgcgcgggaaaccgtgcgccacgggctatcttcccacttgcggtcacggggctgactctgtttgtcatcgcgggcggggcgacggccaccgtcagcacgagattttcctggacgcccgccccctttcccggtacgcgggttgtgggtacgtttatcagaatcatcatcactgcggacatacatcactttgaccttgccgcttttacctttcatttcatcgttcatgcttttctccaccagcgctgcgcgaagcgcgcagattacccgaagtccgcgcggttcgccatgatttcgtaccaaagcctgcgactatcatacctattgaataaaacagattgttgtctggaacaatgtccccgataatatgtaacatattagaaacataccggcgtcgttgccgataagtctccttactcatcccgaggttagttatgaataccgtttgtacccattgtcaggccatcaatcgcattcccgacgatcggatcgaagatgcggcaaaatgcggacgctgcggtcacgacttgtttgacggagaggtgattaatgcgaccggtgaaacactcgacaaattgctgaaggatgatctacctgtggtgatcgacttctgggcaccgtggtgcggcccctgccgtaatttcgcaccaatttttgaagatgtcgcgcaagagcgtagcggtaaagtgcgctttgtgaaagtgaataccgaagctgaacgtgaattgagcagtcgctttggaattcgtagtataccgacgatcatgattttcaaaaacggtcaggttgtcgacatgcttaatggcgcagtaccgaaagcgccgttcgatagctggctgaacgaatctctttaatcttaccggggcgcatcttgtgccccgttttctcctctgcgacaatggcgttttttcgacgctctcttatgaccgaaaacgctgttctccagttacgcgccgagcgtattgcgcgcgcaacacgtccttttcttgcccgcggtaatcgcgttcgtcgctgccaacgctgtcttttgccagagaaattatgtctctgtagcacaattaccccagcacaagcaaaaagtcgcttctgtttgctgatgttcgacaccgagccaatgaagcccagtaataccgggcgtctcattgctgatattttgcctgataccgttgcgtttcaatggagccgtaccgaacccagccaggatttgctggagttggtgcaaaacccggactatcagccaatggtggtctttcccgctagctatgctgatgagcaacgggaagtgatcttcacaccacctgccggtaagccaccgctgtttatcatgctcgatggtacctggccggaagctcgcaagatgtttcgtaaaagtccgtatctggataatcttcccgtcatttccgtcgatctttcccggctttctgcctatcgcctgcgtgaagcccaggctgaaggccaatattgtactgccgaggtagccatcgcactgttagatatggccggcgataccggggcggcggcagggttaggcgagcattttacccgctttaaaacacgctatctggcaggaaaaacgcaacatctgggtagcatcacagcagaacagttagaaagcgtttaaaatcattcggtcacttctgcgggagaccggtatgagtcagcgaggactggaagcactactgcgaccaaaaagcatagcggtaattggcgcgagcatgaaacccaatcgcgcaggttacctgatgatgcgtaacctgctggcgggaggctttaacggaccggtactcccggtgacgccagcctggaaagcggtgttgggtgtgttggcctggccggatattgccagcttgccctttacacccgaccttgcggttttatgtaccaatgccagccgtaatcttgctcttctggaagagctcggcgagaaaggctgtaaaacctgcattattctttccgccccggcaagccaacacgaagatctccgcgcctgcgccctgcgccataacatgcgcctgcttggaccaaacagtctgggtttactggctccctggcaaggtctgaatgccagctttagccctgtgccgattaaacgcggcaagctggcgtttattagccaaagcgctgccgtctccaacaccatcctcgactgggcgcaacagcgtaagatgggcttttcctactttattgcgctcggcgacagcctggatatcgacgttgatgaattgcttgactatctggcacgcgacagtaaaaccagcgccatcctgctctatctcgaacagttaagcgacgcgcgacgctttgttagcgcggcccgtagtgccagccgtaataaaccgattctggtgattaaaagcggacgtagcccggcggcacagcgactgctcaacacgacggcaggaatggacccggcatgggatgcggctattcagcgtgccggtttgttgcgggtacaggacacccacgagctgtttagcgcggtggaaacccttagccatatgcgcccgctacgtggcgaccggctgatgattatcagcaacggtgctgcgcctgccgcgctggcgctggatgccttatggagtcgcaatggcaagctggcaacgctaagcgaagaaacctgccagaaactgcgcgatgcactgccagaacatgtggcaatatctaacccgctcgatctacgcgatgacgccagcagtgagcactatattaaaacgctggatattctgctccacagccaggattttgacgcgctgatggttattcatagccccagcgccgctgctcccgcaacagaaagcgcgcaagtattaattgaagcggtaaagcatcatccccgcagcaaatatgtctctttgctgacgaactggtgcggcgagcactccagccaagaggcacgacgtttattcagcgaagccgggctgccgacctaccgtaccccggaaggaaccatcactgcttttatgcatatggtggagtaccggcgtaatcagaagcaactacgcgaaacgccggcgttgcccagcaatctgacttccaataccgcagaagcgcatcttctgttgcaacaggcgattgccgaaggggctacgagcctcgatacccatgaagttcagcccatcctgcaagcgtatggcatgaacacgctccctacctggattgccagcgatagcaccgaagcggtgcatattgccgaacagattggttatccggtggcgctgaaattgcgtagcccggatattccacataaaagcgaagttcagggcgtcatgctttacctgcgtacagccaatgaagtccagcaagcggcgaacgctattttcgatcgcgtaaaaatggcctggccacaggcgcgggtccacggcctgttggtgcaaagtatggctaaccgtgctggcgctcaggagttgcgggttgtggttgagcacgatccggttttcgggccgttgatcatgctgggtgaaggcggtgtggagtggcgtcctgaagatcaagccgtcgtcgcactgccgccgctgaacatgaacctggcccgctatctggttattcaggggatcaaaagtaaaaagattcgtgcgcgcagtgcgctacgcccattggatgttgcaggcttgagccagcttctggtgcaggtttccaacttgattgtcgattgcccggaaattcagcgtctggatattcatcctttgctggcttctggcagtgaatttaccgcgctggatgtcacgctggatatcagcccgtttgaaggcgataacgagagtcggctggcagtgcgcccttatccgcatcagctggaagaatgggtagaattgaaaaacggtgaacgctgcttgttccgcccgattttgccagaagatgagccacaacttcagcaattcattagccgagtcaccaaagaagatctttattaccgctactttagcgagatcaacgaatttacccatgaagatttagccaacatgacacagatcgactacgatcgggaaatggcgtttgtagcggtacgacgtattgatcaaacggaagagatcctcggcgtcacgcgtgcgatttccgatcctgataacatcgatgccgaatttgctgtactggttcgcagcgatctcaaagggttaggcttaggtcgacgcttaatggaaaagttgattacctatacgcgagatcacggactacaacgtctgaatggtattacgatgccaaacaatcgtggcatggtggcgctagcccgcaagctcgggtttaacgttgatatccagctcgaagaggggatcgttgggcttacgctaaatcttgcccagcgcgaggaaagttgagtaaggtactggaaatgttgaccacttaatcgggactggtgttattattgcccgcttatgtcgtctgcattgcacagaggacccttcaatgaacagagaagaaatgcactgtgatgttgagtaaatttaagcgtaataaacatcaacaacaccttgcccaactacccaagatttctcaaagtgttgatgatgtcgatttcttttacgctcccgccgacttccgggagacgctgctggaaaaaatagccagcgcgaagcagcgcatttgcattgtcgccctgtatctcgaacaggatgacggtggcaaaggcattctgaacgcgttgtatgaggctaaaaggcagcgtccggaactggatgtgcgggtgctggtcgactggcatcgtgcacaacgtggacgcattggcgctgcggcatctaacactaacgctgactggtactgccgcatggcgcaggaaaatccgggcgtagatgttccggtttatggcgttccaatcaatactcgtgaagcccttggtgttctgcactttaaaggctttatcatcgacgatagcgtactttatagcggtgccagcctgaacgatgtttacctgcatcagcacgataaatatcgctacgaccgttatcatctgatccgtaaccgtaagatgagtgacattatgtttgaatgggttacacagaatattatgaatggccgcggcgttaatcgtctggatgatgttaatcggccaaaaagcccggaaatcaagaacgatattcgtctgttccgccaggagctgcgtgatgccgcttatcatttccagggcgatgccgacaacgatcagctttctgtaacgccgctagtggggctggggaaaagcagtctgttgaacaagaccattttccatcttatgccttgtgccgagcagaaactaaccatctgtacgccatacttcaacctgccagcaatccttgtgcgcaatattatccagttgctgcgcgaagggaaaaaggtcgaaattattgttggtgataaaaccgcgaatgacttctacattccggaagatgaacctttcaagataattggcgcattgccttatctctatgagatcaatctgcgtcgtttcctgagccgtttgcagtattacgtcaatactgaccagctagtggttcggttatggaaagatgacgacaacacctatcacctgaaagggatgtgggttgatgataagtggatgttgatcaccggtaataacctgaacccgcgcgcctggcgtctggatctggaaaacgccattttgatccacgatccgcaacttgagctggcgccacagcgagagaaagaactggagctgatccgcgagcataccaccatcgttaagcactatcgcgatctgcaaagtattgccgattatccggtgaaggttcgtaaactcatccgccgtttgcgccgtatccgcatcgaccgattaattagccgcatcctgtaatcacaaccccgtcctgtacggggtttgttttttggaggccacgttttgcgtattctttttgtctgttcgctattgttactttctggatgcagccatatggctaacgatagctggagcgggcaggataaagctcaacactttatcgccagcgcgatgctttccgccgccggaaatgaatatagtcagcatcaggggatgagccgggatcgcagtgccatgtttggattgatgttctctgtcagtttgggggcgagtaaagagctttgggatagccgccccgaagggagcggctggagctggaaggatttggcctgggatgtcgccggtgcaagcaccggctataccgtctggcaactgacccgtcattaaagacgcatccccttccctttgcgatgtagcatcaaagaaaccagaaacgccaccacggccatcaaggtcacataccagaagaaggctgtttccattcctatacttttcaggctcaacgctacgtactccgcgctaccaccaaatatagcattagcgaccgcataactcagaccaacgcctaatgcgcgaacctgtgccgggaacatctcagccttcagtattccactgatacttgtataaaaactcactatcagcagggcacacatcaccagaccaaaagcggcataagggctggaaacgttttgcaatgcactgagaataggaacggtaaaaatggctgccaggctaccgaaacataacatactggtacggcgaccaatcttatcgctcagcgcgccaatgagtggttgaataagcatgaatacaaacaatgcggcagtcataatgccactcgccacgttggcatgcattcccgcagtatttaccagatacttctgcatataagtagtgaaggtatagaaacaaagggagcccgcagcggtaaaaccgagaaccatgatgaatgcacggcgattgcgccataatcctttcagagatccagcttcttttaaagcgcgcgtttcttgttggctagtttcatctaactgacgacgtaaccacaacgccacaacagctaacacagctcctaacgcgaaaggaatacgccatccccactctctgagtgcagcgtcttccatggtgtgttgtaaaaccacgacaaccagtagggctagcagttgtccgccgatcaacgtcacatactgaaaacttgcgtaaaaacctttgcgcccttcaacggcaacttcactcatataggtggcgctggtgccatattctccgccaacagataatccctgaaataaacgagcgagaagcaataatgccggagcccacgtacctatagtttcataacctgggaggcaggcgataaccaggcttccgaaacacatcatacacacgcttaacagcatgctttttttgcgaccatgtttatcggctatgcggccaaatagccaaccgcctattgggcgcatcaggaatcccgcagcaaaaacacctgctgtttgtagtagttgagtcgtcgtgttcccggaagggaagaagatgtgggcaaagtagagactacagaagctgtagacatagaaatcgaaccactcgaccagattaccactagaggcccccacaatcgcccaaatgcggcgacgagtatcactacttgtcagtttgctgtctgccgttacagtactttcagccatgccattatgtctcctgccgtaatccgatgcttttgtcggtcgcttttgtttattttttttgtaaaggaaatattatacatttgttgcatatcattatgcaaccttaaccatgaatttagttagcaggaaaatggttattgaggagcttaaggataaatttctggtaaggaggacacgtatggaagtgggcaagttggggaagccgtatccgttgctgaatctggcatatgtgggagtataagacgcgcagcgtcgcatcaggcatttttttctgcgccaatgcaaaaaggccatccgtcaggatggcctttcgcataatttgatgcctggcagttccctactctcgcatggggagaccccacactaccatcggcgctacggcgtttcacttctgagttcggcatggggtcaggtgggaccaccgcgctacggccgccaggcaaattctgttttatcagaccgcttctgcgttctgatttaatctgtatcaggctgaaaatcttctctcatccgccaaaacagcttcggcgttgtaaggttaagcctcacggttcattagtaccggttagctcaacgcatcgctgcgcttacacacccggcctatcaacgtcgtcgtcttcaacgttccttcaggacccttaaagggtcagggagaactcatctcggggcaagtttcgtgcttagatgctttcagcacttatctcttccgcatttagctaccgggcagtgccattggcatgacaacccgaacaccagtgatgcgtccactccggtcctctcgtactaggagcagcccccctcagttctccagcgcccacggcagatagggaccgaactgtctcacgacgttctaaacccagctcgcgtaccactttaaatggcgaacagccatacccttgggacctacttcagccccaggatgtgatgagccgacatcgaggtgccaaacaccgccgtcgatatgaactcttgggcggtatcagcctgttatccccggagtaccttttatccgttgagcgatggcccttccattcagaaccaccggatcactatgacctgctttcgcacctgctcgcgccgtcacgctcgcagtcaagctggcttatgccattgcactaacctcctgatgtccgaccaggattagccaaccttcgtgctcctccgttactctttaggaggagaccgccccagtcaaactacccaccagacactgtccgcaacccggattacgggtcaacgttagaacatcaaacattaaagggtggtatttcaaggtcggctccatgcagactggcgtccacacttcaaagcctcccacctatcctacacatcaaggctcaatgttcagtgtcaagctatagtaaaggttcacggggtctttccgtcttgccgcgggtacactgcatcttcacagcgagttcaatttcactgagtctcgggtggagacagcctggccatcattacgccattcgtgcaggtcggaacttacccgacaaggaatttcgctaccttaggaccgttatagttacggccgccgtttaccggggcttcgatcaagagcttcgcttgcgctaaccccatcaattaaccttccggcaccgggcaggcgtcacaccgtatacgtccactttcgtgtttgcacagtgctgtgtttttaataaacagttgcagccagctggtatcttcgactgatttcagctccatccgcgagggacctcacctacatatcagcgtgccttctcccgaagttacggcaccattttgcctagttccttcacccgagttctctcaagcgccttggtattctctacctgaccacctgtgtcggtttggggtacgatttgatgttacctgatgcttagaggcttttcctggaagcagggcatttgttgcttcagcaccgtagtgcctcgtcatcacgcctcagccttgattttccggatttgcctggaaaaccagcctacacgcttaaaccgggacaaccgtcgcccggccaacatagccttctccgtccccccttcgcagtaacaccaagtacaggaatattaacctgtttcccatcgactacgcctttcggcctcgccttaggggtcgactcaccctgccccgattaacgttggacaggaacccttggtcttccggcgagcgggcttttcacccgctttatcgttacttatgtcagcattcgcacttctgatacctccagcatgcctcacagcacaccttcgcaggcttacagaacgctcccctacccaacaacgcataagcgtcgctgccgcagcttcggtgcatggtttagccccgttacatcttccgcgcaggccgactcgaccagtgagctattacgctttctttaaatgatggctgcttctaagccaacatcctggctgtctgggccttcccacatcgtttcccacttaaccatgactttgggaccttagctggcggtctgggttgtttccctcttcacgacggacgttagcacccgccgtgtgtctcccgtgataacattctccggtattcgcagtttgcatcgggttggtaagtcgggatgacccccttgccgaaacagtgctctacccccggagatgaattcacgaggcgctacctaaatagctttcggggagaaccagctatctcccggtttgattggcctttcacccccagccacaagtcatccgctaatttttcaacattagtcggttcggtcctccagttagtgttacccaaccttcaacctgcccatggctagatcaccgggtttcgggtctataccctgcaacttaacgcccagttaagactcggtttcccttcggctcccctattcggttaaccttgctacagaatataagtcgctgacccattatacaaaaggtacgcagtcacacgcctaagcgtgctcccactgcttgtacgtacacggtttcaggttctttttcactcccctcgccggggttcttttcgcctttccctcacggtactggttcactatcggtcagtcaggagtatttagccttggaggatggtccccccatattcagacaggataccacgtgtcccgccctactcatcgagctcacagcatgtgcatttttgtgtacggggctgtcaccctgtatcgcgcgcctttccagacgcttccactaacacacacactgattcaggctctgggctgctccccgttcgctcgccgctactgggggaatctcggttgatttcttttcctcggggtacttagatgtttcagttcccccggttcgcctcattaacctatggattcagttaatgatagtgtgtcgaaacacactgggtttccccattcggaaatcgccggttataacggttcatatcaccttaccgacgcttatcgcagattagcacgtccttcatcgcctctgactgccagggcatccaccgtgtacgcttagtcgcttaacctcacaacccgaagatgtttcacttcagagttgcgaaaatttgagagactcacgaacaactttcattgttcagtgtttcaattttcagcttgatccagatttttaaagagcaaatatatcaaacaagacttaacagtctgttttgagatattgaggtcggcgactttcactcacaaaccagcaagtggcgtcccctaggggattcgaacccctgttaccgccgtgaaagggcggtgtcctgggcctctagacgaaggggacacgaaaattgcttatcacgcgttgcgtgatattttcgtgtagggtgagctttcattaatagaaagcgaacggccttattctcttcagcctcactcccaacgcgtaaacgccttgctattcacttttcatcagacaatctgtgtgagcactgcaaagtacgcttctttaaggtaaggaggtgatccaaccgcaggttcccctacggttaccttgttacgacttcaccccagtcatgaatcacaaagtggtaagcgccctcccgaaggttaagctacctacttcttttgcaacccactcccatggtgtgacgggcggtgtgtacaaggcccgggaacgtattcaccgtggcattctgatccacgattactagcgattccgacttcatggagtcgagttgcagactccaatccggactacgacgcactttatgaggtccgcttgctctcgcgaggtcgcttctctttgtatgcgccattgtagcacgtgtgtagccctggtcgtaagggccatgatgacttgacgtcatccccaccttcctccagtttatcactggcagtctcctttgagttcccggccggaccgctggcaacaaaggataagggttgcgctcgttgcgggacttaacccaacatttcacaacacgagctgacgacagccatgcagcacctgtctcacggttcccgaaggcacattctcatctctgaaaacttccgtggatgtcaagaccaggtaaggttcttcgcgttgcatcgaattaaaccacatgctccaccgcttgtgcgggcccccgtcaattcatttgagttttaaccttgcggccgtactccccaggcggtcgacttaacgcgttagctccggaagccacgcctcaagggcacaacctccaagtcgacatcgtttacggcgtggactaccagggtatctaatcctgtttgctccccacgctttcgcacctgagcgtcagtcttcgtccagggggccgccttcgccaccggtattcctccagatctctacgcatttcaccgctacacctggaattctacccccctctacgagactcaagcttgccagtatcagatgcagttcccaggttgagcccggggatttcacatctgacttaacaaaccgcctgcgtgcgctttacgcccagtaattccgattaacgcttgcaccctccgtattaccgcggctgctggcacggagttagccggtgcttcttctgcgggtaacgtcaatgagcaaaggtattaactttactcccttcctccccgctgaaagtactttacaacccgaaggccttcttcatacacgcggcatggctgcatcaggcttgcgcccattgtgcaatattccccactgctgcctcccgtaggagtctggaccgtgtctcagttccagtgtggctggtcatcctctcagaccagctagggatcgtcgccttggtgagccgttaccccaccaacaagctaatcccatctgggcacatccgatggcaagaggcccgaaggtccccctctttggtcttgcgacattatgcggtattagctaccgtttccagtagttatccccctccatcaggcagcttcccagacattactcacccgtccgccactcgtcagcgaagcagcaagctgcttcctgttaccgttcgacttgcatgtgttaggcctgccgccagcgttcaatctgagccatgatcaaactcttcaatttaaaagtttgatgctcaaagaattaaacttcgtaatgaattacgtgttcactcttgagacttggtattcatttttcgtcttgcgacgttaagaatccgtatcttcgagtgcccacacagattgtctgataaattgttaaagagcagtgccgcttcgctttttctcagcggcgcggggtgtgcataatacgccttcccgctacagagtcaagcatttctttgcttttctctgttgagattctcaggagaaccccgccgacccggcggcgtgtttgccgttgttccgtgtcagtggtggcgcattatagggagttattccggcctgacaagcgaaaaatataaaaactttatcgttcgctcacttttcaggcaaaacatcttaaatatagtcttttccgtctaacttatagacaaaaacgagccccgaagggctcgttttatcatttactggacggcgacaatccggtcttcattaacttccaggcgaatcactttacccggaaccaattcaccagacagtatttgctgtgccagcgggttttcgatctgctgctgaattgcacgtttcagaggacgtgcaccatagaccggatcgtaaccgttctcgctcagcagtttcagcgcctcgtcagaaatgtggatttcataaccacgttcttccagacgtttgtacagacgtttcaactgaatctgcgcaatgctggcaatgtgctgttcacccagcggatggaagaccaccacttcatcgatacggttaatgaattccggacggaagttatggcttaccacaccgagcaccagctctttcatgtgcgcataatccagttcaccgaagcgttcctgaatcagatcggaaccgaggttagaggtcataatgacgaccgtattacggaagtcgaccgttctcccttgcccgtcagtcagacgcccatcatccagtacctgcaacagaatgttgaagacatccggatgcgctttttccacttcatccagcaggatgacggaatacggacgacgacgcaccgcttcggtcaggtagccaccttcttcataaccgacatatcccggaggcgcaccaaccaaacgagacacgctgtgtttctccataaactcggacatatcgatacggaccatcgcctcgtcgctatcaaacataaagttcgccagcgccttacaaagctctgttttccccacaccagttgggccgaggaacaggaaactaccaatcgggcgatttggatccgccagccccgcacggctacgacgaatagcgttagataccgcatcaaccgcttcgttctgaccaattacgcgatggtgcagttcttgctccatacgcagcagtttttcgcgctcgctttccatcatgcgagaaaccggaatccccgtccaacgcgccagcacttcagcaatttcggcgtcggtcactttattacgcaacagacgcatagttttgccttcgagctgcgttgcggcttccagttgcttttccagttccgggattttgccgtattgcagttcagacatccgcgccaggtcccccacacggcgagcctgttcaatagcgattttcgcctgttccagttccgctttaatggtctgcgtaccagaaaggcttgccttctctgctttccactcttcttctaactcggagtactgacgttctttgtcgctcagttcttcgttgagcatatccagacgttttttactggcttcatcagactctttcattaacgcctgttgttccagtttgagctggatgatacgacgatcgagtcggtcgagttcttctggtttactgtcaatctgcatacgaatgctggatgctgcttcatcgatcaggtcgatggctttatccggcagctgacggtcagcaatgtagcgatgagacaacgtcgccgctgcaacaattgccgggtcagtaatttgcacatggtggtgcaattcgtaacgttctttcaggccacgcagaatcgcaatggtatcttcaacagaaggctcggcaacaaacactttctggaaacgacgttccagcgcagcatctttttcaatgtactggcgatattcgtcaagcgtcgtggcacctacgcagtgcaattcaccacgcgccagcgccggtttcagcatgtttccggcgtccattgcgccatcggctttacccgcgccgaccatggtatgtaattcgtcgataaataggatgacgttgccttcctgtttggcaagatcgttaagcacgccttttaaacgttcttcaaactcaccgcgatatttcgccccagccaccagcgcgcccatatccagcgccagtacccggcggcctttcaacccttccggcacttcgccgttgataatacgctgcgccagaccttcaacgatggcagttttaccgacgccgggttcaccaatcagtaccgggttatttttagtacgacgttgcagcacctgaatggtacggcgaatttcttcatcacgaccaatcaccggatcgagtttgccctgttcggctcgttcggtaaggtcgatggtatattttttcaaagcctgacgttggtcttcagcaccttgatcgttcacgctttcacctccacgcatttgttcaatcgcttgagtaatgttggcggtggtcgcccctgctgctttcaggatgtcggccagcgtgccgcgagactcaagtgccgccagaacgaacagttcactgctgataaagttatcaccacgtttttgcgccagcttgtcgcaaagattaagaacgcgcaccagatcctgacttggctggacatcaccaccagtaccttcaacctgcggtaaacgatttaatgcctgattgatatctgtgcgcaactggccagcatttatgccagcggatgttaataaaggactaacgctacccccttcctgattcagcagggcgctcattaaatgaagtggttcgataaattggttgtcgtgcccgagtgcaagactttgggcatcggcaagagcaagctggaatttattagtaagacgatccagacgcataactcctcccataacggatcaaagttgctactggagattaaatgaggtcatccctcaattattcaaggttattgaccagattaatgtgaaaagaaaatcacgcgtaccggatcgtcttgattctttaggttatatcagccaaatgaaacttgccatacgaccggtggtcttgtcgcgacgataagagaagaaagtctcattttccgtatatgtacaacggtcgccgccgaaaatttgctcaacacccacgttcgccagacgctgccgggcaagctgataaatatccgccagatacttatcaccatgctgaatgaaagctgcacttgctttagcgtctactgccataaacgcctcgcgaacctccccccccacttcgaacgcgcgtggaccaattgccggccctaaccaggcgagaatattttccggattatcagcaaaacaggaaaccgtctcttccagcacgcctgcgcacagtccacgccagccagcatgagcggcggcgacttccgttcccgctcgattgcaaaacagcacagggaggcagtcggcagtcatcactgcgcaaaccgtgccgggcgtattgctataagaggcatccgcccgtttactggcataaggttcgccagtgagcttaagcacatctttgccgtgtacctgctcaagccagaccggtttagaaggcaaattgcccgcagcaaaaagtcgcttgcgattctcctcaacgtgatccgggttatcgccacaatgggcaccgaggttgagactgtcatacgggggcaagctcacgccgccgatacgagtggagctacaggccgcaacaccttttggctgcggccactgcgggacaatcagcttactcataaccagtccacttcatccttatgttcttcgaaatcggcgcgcatcacctcaatcagctccaccatatcttgtggaataggcgcatgccattccatttcgatgccggagatcgggtgataaagacgcagcatggttgcatgtagcgcctggcggtcaaacttacgcagcgtggagataaatgcttcgctagcaccttttggcggacgcggacggccaccataaaccggatcgcccaccagcggatgagtgatatgggccatatgcacgcggatctggtgcgtacgtccagtttccagacgcaaccgcagacgcgtgtgcacacggaagtgttccatgatgcgatagtgagtcaccgctggtttgcccatcggatgcaccgccatatgggtacgtttggtcgggtggcgactgattggctcgtccaccgtgccacctgcggtcatatgaccaatcgccaccgcttcatactcacgagtaatttcacgccgttgcaaagattcgactaaacgcgtctgagccggaacggtttttgccacaaccatcaggccagtggtgtctttatccagacgatggacgatgcccgcacgcggtacatcggcaatgggtggatagtaatgaagcaacgcattcagtaccgtgccatccgggttacccgcgccaggatgtaccaccaggtcgcgcggtttattaatgataataatgtcttcatcttcatagacgatatccagcgggatatcctgcggttcaaaacgcgcttcttcttcaatctcagcgttgatggcaacctgctcgccacccaatactttttctttcggcttatcacaaactttgccgttaaccagcactcgctggtcgaggatccattcttttattcggctacgactataatccgggaacatttcggccaaagcctgatctaagcgttgaccgagttggttttcggacaccgttgcagtgagctgtactcgttgtgccatatatactgcttcttcgtttatcgttggggttttacggctttgccgtttaatatagtgtgctattgtagctggtcttaaccgggagcaggaacagagaatctcccgtattacattttgaggaaagtcaaaacgtcatgacgcgcatgaaatatctggtggcagccgccacactaagcctgtttttggcgggttgcagcgggagtaaggaagaagtacctgataatccgccaaatgaaatttacgcgactgcacaacaaaagctgcaggacggtaactggagacaggcaataacgcaactggaagcgttagataatcgctatccgtttggtccgtatagccagcaggtgcagctggatctcatctacgcctactataaaaacgccgatttgccgttagcacaggctgccatcgatcgttttattcgccttaacccgacccatccgaatatcgattatgtcatgtacatgcgtggcctgaccaatatggcgctggatgacagtgcgctgcaagggttctttggcgtcgatcgtagcgatcgcgatcctcaacatgcacgagctgcgtttagtgacttttccaaactggtgcgcggctatccgaacagtcagtacaccaccgatgccaccaaacgtctggtattcctgaaagatcgtctggcgaaatatgaatactccgtggccgagtactatacagaacgtggcgcatgggttgccgtcgttaaccgcgtagaaggcatgttgcgcgactacccggatacccaggctacgcgtgatgcgctgccgctgatggaaaatgcataccgtcagatgcagatgaatgcgcaagctgaaaaagtagcgaaaatcatcgccgcaaacagcagcaatacataacagaaacctgaaacacaaaacggcagcccttgagctgccgtttttttattctgtcagttgtgaaactgaagcgatttagtcgctatcgatctcatcaaatatggctcgctttgagatattcctcaagtaaaaaaacatctcttcctgcgatttctcacaaaaaagattcgttgacaaaaagtgacaaaattatgagattttcatcacacattttgacatcaggaacggtatgctgaattcaccaagacgggaagacaagaggtaaaatttatgacaatgaacattaccagcaaacaaatggaaattactccggccatccgccaacatgtcgcagaccgtctcgccaaactggaaaaatggcaaacacatctgattaatccacatatcattctgtccaaagagccacaagggtttgttgctgacgccacaatcaatacacctaacggcgttctggttgccagtggtaaacatgaagatatgtacaccgcaattaacgaattgatcaacaagctggaacggcagctcaataaactgcagcacaaaggcgaagcacgtcgtgccgcaacaagcgtgaaagacgccaacttcgtcgaagaagttgaagaagagtaatcctttatattgagtgtatcgccaacgcgccttcgggcgcgttttttgttgacagcgtgaaaacagtacgggtactgtactaaagtcacttaaggaaacaaacatgaaacacataccgtttttcttcgcattcttttttaccttcccctgaatgggaggcgtttcgtcgtgtgaaacagaatgcgaagacgaacaataaggcctcccaaatcggggggccttttttattgataacaaaaaggcaacactatgacaagcgaaaacccgttactggcgctgcgagagaaaatcagcgcgctggatgaaaaattattagcgttactggcagaacggcgcgaactggccgtcgaggtgggaaaagccaaactgctcagccatcgcccggtacgtgatattgatcgtgaacgcgatttgctggaaagattaattacgctcggtaaagcgcaccatctggacgcccattacattactcgcctgttccagctcatcattgaagattccgtattaactcagcaggctttgctccaacaacatctcaataaaattaatccgcacagtgcacgcatcgcttttctcggccccaaaggttcttattcccatcttgcggcgcgccagtatgctgcccgtcactttgagcaattcattgaaagtggctgcgccaaatttgccgatatttttaatcaggtggaaaccggccaggccgactatgccgtcgtaccgattgaaaataccagctccggtgccataaacgacgtttacgatctgctgcaacataccagcttgagcattgttggcgagatgacgttaactatcgaccattgtttgttggtctccggcactactgatttatccaccatcaatacggtctacagccatccgcagccattccagcaatgcagcaaattccttaatcgttatccgcactggaagattgaatataccgaaagtacgtctgcggcaatggaaaaggttgcacaggcaaaaagtccgcatgttgctgcgttgggaagcgaagctggcggcactttgtacggtttgcaggtactggagcgtattgaagcaaatcagcgacaaaacttcacccgatttgtggtgttggcgcgtaaagccattaacgtgtctgatcaggttccggcgaaaaccacgttgttaatggcgaccgggcaacaagccggtgcgctggttgaagcgttgctggtactgcgcaaccacaatctgattatgacccgtctggaaagtcgcccgattcacggtaatccatgggaagagatgttctatctggatattcaggccaatcttgaaagtgcggaaatgcaaaaagcattgaaagagttaggggaaatcacccgtagtatgaaggtattgggctgttacccaagtgagaacgtagtgcctgttgatccaacctgatgaaaaggtgccggatgatgtgaatcatccggcactggattattactggcgattgtcattcgcctgacgcaataacacgcggctttcactctgaaaacgctgtgcgtaatcgccgaaccagtgctccaccttgcggaaactgtcaataaacgcctgcttatcgccctgctccagcaactcaatcgcctcgccgaaacgcttatagtaacgtttgattaacgccagattacgctcactgctcataatgatgtcggcataaagctgcggatcctgagcaaacagtcgcccgaccatcgccagctcaaggcggtaaatcgggctagagagcgccagaagttgctcaagctgaacattttcttctgccaggtgcagcccgtaagcaaaagtagcaaagtggcgcagtgcctgaataaacgccatattctgatcgtgctcgacggcgctaatacgatgcagccgagcgccccagacctgaatttgctccagaaaccattggtatgcttccggtttacgtccatcacaccagaccacaacttgctttgccaggctaccgctgtccggaccgaacatcgggtgtagccccagcaccggaccatcatgcgccaccagcatggcctgtaatggcccatttttcacacttgccagatcgaccagaatacaatctttcggtaaaggcggtaatttgccaataacttgctcagtaacgtggattggcacactaacaatcaccattccggcatcggcaacaatatcagccgctcgatcccagtcatgttgctccagaatccgcacctgataaccgctgagggtcagcatcttctcgaacaggcgtcccatctgaccgccaccgccgacgataaccaccggacgcagactcggacaaagtgttttaaatcctttgtcgttttcactggagtaagattcacgcatcacccgacgcaaaacatcctcaatcagatctggcggtacacccagagcttccgcctctgcacgacggctggccaacatagatgcctcgcgctccggaacataaataggcagtccaaagcggcttttcacctcgcccacttcagcaaccagttccagacgcttcgctaataaattcagcagcgctttatcgacttcatcaatttgatcgcgtaatgcggtcaattcagcaaccataataaacctcttaagccacgcgagccgtcagctgcccgttcagatcctgatgaatttcacgcagcaaggcatcggtcatttcccagctaatgcaggcatcggttacggatacaccgtatttcatttcactgcgcggttgctcggaagactgattgccctcgtggatattactttcgatcatcagaccaataatactgcgattgccatctttgatttgagcaaccacggattctgccaccgcaggctgacggcgataatctttattggaattaccgtggctgcaatctaccatcagagacgggcgcagtcccgcctgttccatctctttttcacattgcgcaacatccgcagggctatagttcggcgctttaccaccgcgcaggatcacatggccgtccggattcccctgagtttgtagcaacgcaacctgccctgcctggttaatgccaacaaaacggtgcggctgggcggcggcgcgcatagcgttaattgctgttgccagactgccgtcggtgccgtttttaaaaccaaccggcatggaaagcccggaggccatttcacggtgagtttggctttccgttgtacgagcaccaattgcactccagctaaacagatcgcccaggtattgcgggctattcggatctaacgcttccgtcgccagtggcagtcccatattcaccagctcaagcagcaatttacgcgcgatctgcagcccggcttctacatcaaaagagccatccatatggggatcgttaattaaccctttccagccgacagtggtacggggtttttcaaaatagacgcgcattaccagatagaggctatcgctgacctctgcggcaagggctttaaatcgacgagcatattccagagcagtttccggatcatgaatggaacaaggaccacatactaccagcagacgaggatcgcgcccggcgataatatcactaatgcttttacggctgtcagcaatctgggcttcttgttgcaggctcaatggaaaagcggccttcagttgttccggagtcattaaaacctgttcgtcggtaatatgtacgttattcagcgcgtctttttgcatgatggcgatcctgtttatgctcgtttgcgatagttgatcctcagcgaggatgacgtaacgataacacataaagtaaagttttcaatccatatttcgtacatttttatttacacaggcaatttagtcgcgctttcaacccttacctctgtatagataaatttacactccctttgaaaacaatccgctatgctttgaaaaaggagaaagaaatgatgaaaaagtttatcgcccccttgttggctttactggttagcggatgtcagattgatccttatactcacgcgccaaccttgaccagcaccgactggtatgatgtcggtatggaagatgcgataagcggcagcgccataaaagatgacgatgcatttagcgatagtcaggcggatcgcggtctataccttaaaggatatgccgaaggacaaaagaaaacttgccagaccgattttacttatgcccgaggactttccggtaaaagctttcctgccagctgcaacaatgttgaaaatgccagccaactgcatgaagtaggcaaaaaggggctgatgaaaatgccagcacaatacgattaaattaattaaaaccccacaaataaattaaacataagattttactcattgtgttttatttctcacattgatgacggtcgcatgaaaaaatgatattttaatgagcattctgaaaaaatatcgatgcatttcgagcgaagatggtggggatccctgaatgcgtttttctcaccgactgttcttacttctgattctcctgctgacgggagcaccaatactcgctcaggagccttctgacgttgcgaaaaacgtgcgtatgatggtttccggtattgtcagttacacccgctggcctgcgctaagtgggccaccaaagttatgtatctttagttctagtcgttttagtaccgccctacaagagaatgccgcgacatctttgccttatctgcctgtcatcattcacactcaacaagaggcgatgattagtggctgcaatggtttttattttggcaacgagagtccgacattccagatggaattaaccgaacaatatccgagtaaggcgttattattaattgccgaacaaaataccgagtgcattattggtagcgccttttgtctgatcatccacaataatgacgtcagatttgccgtaaacctggatgccttaagccgtagcggtgtaaaggtcaacccggatgtcttaatgctcgcacggaagaaaaatgatggataacgataattctcttaataagcgccccacgtttaaaagagcattacgcaacatcagtatgaccagcatatttatcactatgatgctgatctggttgctgctttccgtgaccagcgtgctgaccctgaaacagtacgcgcaaaaaaacctggcactgacagcagcaacaatgacttacagtctggaagcagctgtcgtttttgccgatggccctgcagcaactgaaacactggcagcgctgggccagcaagggcaatttagtactgcagaagtacgtgataagcagcaaaatattctggcatcctggcattacacccgtaaggatccaggcgatactttcagtaatttcataagccactggctcttccctgcccccatcattcagccgattcgtcacaatggtgaaaccattggcgaagtacgcttaaccgctcgcgacagtagtatcagccattttatctggtttagcctcgccgtactgaccggttgtattctgctggcaagtggcatcgcaattaccctcacccgccatttgcacaatggcctggtagaagcgctgaaaaatatcaccgatgtcgtacatgatgtgcgttccaaccgcaatttttcccgacgagttagcgaagaacgtatcgctgagtttcaccgcttcgctctcgacttcaacagtctgctggatgaaatggaagagtggcagcttcgtttacaggctaaaaatgcgcagcttctacgtaccgcgctacatgacccattaaccgggctggctaaccgcgcagcgtttcgtagcggcatcaacacgttgatgaacaattccgatgcccgaaaaacgagcgcgttactatttcttgatggcgataatttcaaatacatcaatgatacctggggtcatgcgacgggcgatagagtcttgattgaaatcgcaaaacggttagctgaatttggcgggctgcgacataaagcataccgcctgggcggcgatgaattcgctatggtgctctatgatgtacagagcgaatctgaagtgcagcagatatgtagtgcactgacacaaatctttaatctcccgtttgatcttcataatggccatcagaccaccatgacattaagcattggttacgcgatgaccattgagcacgcctctgcggaaaaattacaagagcttgccgatcacaatatgtatcaggccaaacaccagcgtgccgaaaagctggtgagataacaaggatatatcgatatgataaagcacctggtagcacccctggttttcaccagtctaatactgactggctgccagtcccctcagggaaagtttactcctgagcaagtcgccgctatgcaatcttatggatttactgaatccgccggcgactggagcctgggcttaagtgatgccattctgttcgcaaaaaatgactacaaattgctcccggaaagccagcaacagatccaaaccatggcagctaaattggccagcacagggctaacacatgcccgtatggatggacacaccgataactatggtgaagacagttacaacgaaggcttaagtttgaaacgggcgaatgtcgtggccgatgcatgggctatgggtggacaaattccacgcagcaatctcaccacacagggtttaggaaaaaaatatcccatagccagtaacaagaccgcccagggccgcgccgagaaccgccgcgtcgcagtggtgattactaccccttaaaacaccagcaaacagataaaaaagggccagccaattggccagcccttcttaacaggatgtcgcttaagcgaaatcttagttaagacgctctttgatacgagcagccttaccagtacgctcacgcaggtagtacagtttagctttacgaacagcaccacgacgtttgacagaaatgctgtcaactaccggagagtgagtctggaagacacgctcaacgccttcgccgttggaaattttacgaacagtgaatgcagagtgcagaccgcggttacgaatagcgataaccacgccctcgaatgcctgcagacgttttttggaaccttcaacaacccatactttcacttccacggtatcacccggacggaaggaaggtacgtcctgcttcatctgctcttgttcaagttgcttaataatgttgctcataatttaatctcttatcctgggtaaactgatatctcgggggcttacgccatcccatcatgtttatgttgctgttgtgcgtgttccgttttgaactccgccagcaaccttgcttgctcttcagtcagagccaggttttccagaagttcaggtcttctaagccaggtacggcccaggctctgtttcaaacgccagcgacgtatctcggcatggttgccgctcagtaacactggcggaacttccatcccttctaacacctcaggccgcgtatagtgcgggcaatccagcaatccttcagcaaaggaatcttccgttgcgctggcttcatgtcccagtactcccggaataaaccgggaaacggagtcaatcagcgtcattgctggtaactcaccaccactgagaacgtaatcgccgatactccattcttcgtcaatttcggtttggatcacgcgctcatctataccttcgtagcgaccgcacaccagaatcaatttttgattcgttgccagttcgctgacgcccgcttgatcaagcttgcgtccctgtggactcagataaatcacctttgcgccttcacccgccgcggcttttgctgcatgaatggcgtcccgcaagggttgcaccatcattaacatccccggtccgccgccgtaaggacgatcgtccacggtacggtgccggtcatgcgtgaagtcgcgaggactccagctctggatgctcagcaggccatttttaactgcccggccagttaccccgtaatcggtaattgcgcggaacatttcaggaaacaggctaattatgccaatccacatagcgccgtcttttaccgtttatccggtggtttaaaaaccaggatcccaatctacttcgatactacgagtagtgagatcgactttcttgataacctgcccatcgaggaacggtacgagacgttccttgataccaaacgcatctttcaggtttgccttaatgacgagaacgtcattagatccggtttccatcatatcgacgactttaccgagatcgtagccttcagtggttactacctggcagcccatcaggtctttccagtagtagtccccctcttcaagctgaggcagctggctactatccacgacaatttcacaattcgtcagcaggttcgccgcatcacgatcgtcaacgcctttcagcttgatgatcatgtcctgattgtggtgcttccagctttccagctggacttgctgccactgacccgccttctggataaaccagggctgatagtcaaaaatgctttcggcgtcttcggtggaagaaaacactctgagccacccacgaataccgtaagagctacccatttttcccaaaacgatgggatcaacaggtgcttgcgcggtgagttgtttgctcatcatgaccaccgtgacagattaagctgctttgtttacttctttgatcagcgcagcaacgcgatcagaaatagttgcgccctggccaacccagtgagcgatgcgatccagatccaggcgagtgccttcttctttttcgctagcgattgggttgaagaaaccaacgcgctcgatgaagcgaccgttgcgtgcattacggctgtcagcgacaacaacctggtagaacggacgctttttagcgccgtgacgtgctaaacgaatagttaccataacatcctcttgtgtgaataaaacaaccggaccccatcgaggaacggagtccggtgtcatattaaaagcccgaaaattttactcatttttgcgggaattgcaatcaacagttgctaactctgctgtaaaaggccgtcggcggtgcagccagtttggtgccggagtgcgcgcagtcaccggagcgtacacgcagtacgtgaggatgacgagcacatcccggtgccaaaatggcaaacaagccaggccgattagcgaccagggaagcctgggggcatcatacccttcatgcttctcatcatcttcgccattccgcccttcttcattttcttcatcatgcgctgcatgtcgtcgaactgtttcagaagacggttaacgtcctgcacctgcataccgcaaccggcagcaatacggcgtttacggctacctttgatgatttctggcttagcgcgctctttcatcgtcatgctgttgatgatggcttccatacgcaccagcactttatcgtccatctgactcttgacgttatccgggatctgccccatgcccggcagcttgcccatcagactagccatgccgcccatatttttcatctggcgcagctgctcaagaaagtcgttgagatcgaagccgtcaccttttttcagcttgctggctaatttctctgcctgcgcgcggtcaactttgctttcgatatcttcgatcaggctcagtacgtcgcccatgccgagaatacggctcgcgatgcggtccggatggaacggctccagcgcctcagttttctcgccaacaccgaggaacttgatcggtttgccagtgatgtgacgaatagagagcgccgcaccgccgcgggcatcgccgtccactttggtcaacactacgccggtaagcggtaacgcttcattgaatgcttttgccgtattggccgcatcctgaccggtcatggcgtcaaccacaaacagggtttcaaccgggttaatgctcgcatggacttgtttgatctcgtccatcatcgcttcgtcaacgtgcagacgaccagcggtatccaccagcagcacgtcgtagaatttcagtttggcttctttcagcgccgcgttaacgatatctaccggcttctgaccaacatcagaagggaagaaatcaacgcccacctgctctgccagcgtctcaagctgtttgattgccgccgggcgataaacgtcggcagaaaccaccagcactttcttcttgtgcttctcgcgcaggaacttaccgagtttaccaacgctggttgttttaccggcaccttgcaggcccgccatcagtacgaccgcaggcggttgcgcagccaggttcagggtctggttctcttcgcccatcgccgcaaccagttcgttacggactattttgacgaactcctgccccggcgtcaggctcttattaacttcatgaccaaccgctttctcttttacgcgattgataaactcacgcactaccggcagagctacgtccgcctccagcagcgccatgcgcacttcgcgcagcgtatcttttacgttgtcttcagtgaggcgtccacggccactgatattgcgcagcgtgcggctcaaacgatcggttaaattatcaaacattgtctctcgcctggggtggaaacggttggccgcaatcgcgacacatcatcagtattttgccgcagtataacatgaaggcgtctttgttgttatgcaacggttggagcagcgtagtcctgacgctatactgcttctctttcttattgctcaaactgtcgacatcactatgcccgtttttgctctgctcgcgcttgtcgcctactccgtcagtcttgcgctgattgttcccggtctgctgcaaaaaaacggcggctggcggcgcatggctattatttctgcggtcattgcgctggtctgccacgcaatcgctctggaagcccgcatcctgcccgacggtgatagcggacaaaacctcagcctgctgaacgttggtagtttggtcagtttgatgatctgtacggtaatgaccattgtggcttctcgcaatcgtggctggctgctgctacccattgtctatgcctttgcgcttatcaacctggcgctggcaaccttcatgcccaatgaatacatcacccatctggaagctacgcctgggatgctggtgcacattggcttaagcctcttttcctatgccacgctaattatcgccgccctgtacgcgctgcaactggcgtggattgattaccaactgaagaacaagaagctggcgtttaaccaggaaatgccgccattgatgagtatcgagcgtaaaatgttccacatcacgcagattggcgtggtgctgctaacgctcacgctttgcactggcctgttctacatgcacaacttatttagcatggaaaatatcgacaaggctgtgctctctatcgtggcgtggtttgtctatattgtgctgctgtggggacattatcatgaaggatggcgtggacgccgcgtcgtctggtttaacgttgcgggcgcggtaattctgacactggcctacttcggcagccgaattgtccagcagttaatcagctaaacccagaaaaggagtttcccctggaacacatttctactactacgttgatcattattctgatcatcatggtggtcatttcagcctatttttccgggtccgaaaccggaatgatgaccctcaaccgctatcgtctgcgacatatggcgaaacagggtaatcgcagcgccaaacgcgtcgaaaaattgctgcgtaagccagaccgcctgataagcctggtgttaatcggcaataacctggtcaatattcttgcctccgcgctcggcactattgttgggatgcgtttgtacggcgatgcgggcgtggcaattgcgactggtgtgctgacttttgtcgtactggtatttgctgaggtattgccgaaaaccattgccgcgctgtacccggaaaaagtcgcttatccgagtagttttctgctggctccgctgcaaattttgatgatgccgctggtctggttgctgaatgctatcacccgtatgctgatgcgcatgatgggtatcaaaaccgatatcgtggttagcggctctttgagcaaagaagagttgcgcactatcgtgcacgaaagtcgcagtcaaatttcccgtcgcaatcaggatatgctgctgagcgtgctcgatctggaaaaaatgaccgttgatgacatcatggtgccgcgcagtgaaattatcggtattgatatcaacgatgactggaaaagcattctgcgccaactctcccacagtcctcacgggcgcatcgtgctctaccgtgatagcctggacgacgccatcagtatgctgcgagtacgtgaagcctggcggttgatgagcgagaaaaaagagttcaccaaagaaaccatgctgcgcgccgcggacgagatctattttgtgccggaaggtacgccgctcagcacgcagttggtaaagtttcagcgcaacaaaaagaaagtcggcctggtcgtcaacgagtatggagacattcaggggctggtgacggttgaagatattctggaagagattgtcggcgatttcactacgagcatgagcccaacacttgccgaagaggtcacgccgcaaaacgacggtagcgtgattatcgatggcaccgccaacgtgcgggaaatcaacaaagcctttaactggcatctaccggaagatgatgcccgcacggttaatggcgtcattcttgaggcactggaagagatccctgtcgcaggcacccgcgtgcgtattggcgagtacgatatcgatattctcgacgtacaggacaatatgattaagcaggtaaaagtttttcctgtgaaaccgctgcgcgagagtgtggcggagtaacgaaaacggcccggcattcgcatgcagggccgtgaattattacgaaagcagaaattaagcttttgctttcgctacagtaaccatcgccgcacgaatcgtacgaccattcagcgtataacccttctgcataatgcccagtacgttacctggcgcaacgtcatcagattccaccattgcgatggcctgatgcacattcgggtccagtgggacgttagtttcggcgatcacttcaacgccaaacttacgcacaacatccagcatgctcttcagcgtcagctcaatgccttcaaccatcgcagacatatccgggttagctttatcagccacttccagcgcacgatccaggctatcaatcaccggcagcaattcgttgatgaatttctccagcgcgaatttgtgggctttttcaatatccagttcagtacgacgacgcaggttttccatttcggcttttacacgcaaaatgccgtcacgttcacgggtctgggcttcagccagctgagcttcgagattcgcaactttttcatcgcgcggatccacctgctcagcagaagcttctggctcaactgcctcaatctcttcgtgctgatccatgataatttcttccggggcttgcccctcaggcgttttctgttctttactactcatgaatttctccgcgtttttttcgcattcatctcgctaacttcgcttattatggggatcagtttcagggtttcaagggaagcactcacattgtcatcaatcttcgcaacaaggacctcggaaaaatgaataatcatttcaagtgtattggcattgtgggacacccacggcaccccactgcactgacaacacatgaaatgctctaccgctggctgtgcacaaaaggttacgaggtcatcgttgagcaacaaatcgctcacgaactgcaactgaagaatgtgaaaactggcacgctcgcggagattgggcaactagctgatctcgcggtagtcgttggtggcgacggtaatatgctgggcgcggcacgcacactcgcccgttacgatattaaagttattggaatcaaccgtggcaacctgggtttcctgactgaccttgaccccgataacgcccagcaacagttagccgatgtgctggaaggccactacatcagcgagaaacgttttttgctggaagcgcaagtctgtcagcaagattgccagaaacgcatcagcaccgcgataaatgaagtggtgcttcatccaggcaaagtggcgcatatgattgagttcgaagtgtatatcgacgagatctttgcgttttctcagcgatctgatggactaattattagcacgccaacaggctccaccgcctattccctctctgcaggcggtcctattctgaccccctctctggatgcgattaccctggtgcccatgttcccgcatacgttgagtgcacgaccactggtcataaacagcagcagcacgatccgtctgcgttttagccatcgccgtaacgacctggaaatcagttgcgacagccagatagcactgccgattcaggaaggtgaagatgtcctgattcgtcgctgtgattaccatctgaatctgattcatccgaaagattacagttatttcaacacattaagcaccaagctcggctggagtaaaaaattattctaattttacgccagcctctttactgtatataaaaccagtttatactgtacacaataacagtaatggtttttcatacaggaaaacgactatgttggcacaactgaccatcagcaactttgctatcgttcgtgagcttgagattgattttcatagcggcatgaccgtaataactggcgagaccggcgcgggtaaatctattgcaatagatgccctcggtctttgtctcggtggtcgcgctgaagccgacatggtgcgtaccggcgctgctcgcgctgacctgtgcgcccgtttttctctgaaagatacgccagcggctctgcgctggctggaagaaaaccagcttgaagacgggcatgaatgtttgcttcgtcgcgtgatcagcagcgatggtcgctcccgtggtttcatcaacggtacagctgttcctctgagtcaactgcgcgaactgggtcagttgctgattcagatccatggtcagcacgctcatcaattactcaccaaacctgagcaccaaaaattcctgcttgatggctatgccaatgaaacctctctactgcaggaaatgaccgcacgttatcagttgtggcatcaaagctgccgtgacctcgcgcatcatcaacagttaagtcaggaacgcgccgcccgtgcggaactgctgcaataccaattaaaagaacttaacgaatttaatccgcagcccggagagtttgaacaaatcgacgaagagtacaaacgtctggcgaacagcggtcaattgctgaccaccagccagaatgcattggcattaatggccgacggtgaagacgcaaacctgcaaagtcagctttacacggctaaacaactggtgagcgaattgattggcatggacagcaaactgtccggcgtacttgatatgctggaagaagctaccatccagattgctgaagccagcgatgaactgcgccactactgcgatcgtctggatctcgatcccaaccgactatttgaacttgaacagcgcatcagtaaacagattagcctggcacgtaaacatcacgtcagccctgaggcattgccacagtattaccagagcctactggaagaacagcagcaactggacgatcaggccgacagtcaagaaacgcttgcgctggcggtaacgaaacatcatcagcaggcactggaaatcgcgcgcgcattacaccaacaacgccagcaatatgcagaagaacttgcacagctgatcaccgacagtatgcatgcgctcagtatgccgcatgggcagtttacgatcgatgttaaatttgacgagcatcacctgggcgctgacggtgccgatcgtattgagtttcgggtaaccaccaacccaggtcagccaatgcagcctattgccaaagtcgcatccggtggtgaattgtcccgcatcgcactggcaatccaggtcatcacggcgcgtaaaatggaaaccccggcactgatttttgatgaagtggatgtagggattagcggtccaacagcggcagttgtcggcaaactgctgcgtcaactcggcgaaagtactcaggtgatgtgtgttacccacctgccacaagtcgcgggatgtggtcatcaacactattttgtcagcaaagaaaccgatggtgcgatgacagaaacgcatatgcaatccctgaataaaaaagcgcggttacaagagctggcgcgcctgcttggtggcagtgaagtcacacgtaatacactggcgaatgcgaaagaactgcttgcagcgtaaacttttttcctgcttcacggtcagagtaaacagcaaaacgccgtaagaccggaaagcaaaaggttttaaagtgatgaaaggtctattatcatcggcatattacagatgagccacgtactgctcgggcccgaaaaggaatcaaatcactatgcgctgtaaaacgctgactgctgcagcagcagtactattgatgttgaccgcaggctgttccactctggagcgagtggtttaccgtcctgacatcaaccaggggaactatctgaccgctaacgacgtatccaaaatacgtgttggcatgacgcaacaacaagttgcgtacgcattgggtacaccgctgatgtccgatccatttggtacgaatacctggttctatgtcttccgccagcaaccaggtcatgaaggtgtaactcagcaaacgctgacgctgacctttaacagtagcggtgtgttgaccaatattgataacaaacctgcgctgagtggtaactaataataaagttgctctcaaagacgttaaaaaaggtgctcaatgagcaccttttttctgtctgttatttattcgcacttttttctgctcgttgcctgcgaagctctttcggatcggcaatgagagggcgataaatctccacccgatcgccatcatgcacactatcgcttagttttgccggacggctgtaaatgccgactttgtttttagttaaatcgatatcggtacgcaattccagcaagccactggcgcgaatagcttcttcaaccgtcgcgccctcctgcagcgtcactcgctgcaggtactgcttctcaggtagcgcataagccacctcaacggcaattttacctggcactgtaaacctctttcgcacgaaccgtaaaagcctggaccatattagccgccagctctttaaacacgcgaccaaaggcgagttcaatcaacttattggtaaactcaaagtcgagatgaaactcgatacgacacgcctcctggctcagcggcgtaaacttccatccaccaatcaatttcttgaacggcccatccaccagattcataagaatactttggttactggtcaactggttgcgggtagtaaacgttttgctgatcccagccttagagacatctaccgccgcagtcatctgcccaggagtggactccagaatccgacttccggtacaacccggcaaaaactgaggataagactgaacgtcattcactaactgatacatttgctccgcgctgtagggtaccagtgcggtccggctaatctgaggcataacaatttccatcaacaaaaatccaacaaataatatcatttatcctgctgtaaaaaaaacgctatcccggcgctgggtaacatcgggttcatgctaagatagagccttgtcccccgcaggattgatatggggtgttttcgatttcagattaccgatgattcacgacgcttatgacgaagaaaaaagcacataaacctggtagtgcgaccatcgcgcttaacaagcgcgcccgtcacgaatactttatcgaagaagagttcgaagcgggacttgccctgcaaggctgggaagttaaatccctgcgcgcaggaaaagccaatatcagcgacagctacgtccttctgcgtgacggagaggcatttctgtttggcgctaacatcacgccaatggccgtggcctccacgcatgtggtgtgcgatcctacccgtacccgcaagttacttctcaaccagcgcgaactggacagtttgtacggtcgcgtcaatcgagaaggctataccgtagtggcgctctccctgtactggaaaaatgcctggtgcaaagtgaaaatcggcgtcgccaaaggtaagaaacagcacgataaacgtagtgatatcaaagagcgcgaatggcaggtggataaagcacgtatcatgaaaaacgcccaccgttaaacctgcactccaattattgaccagttcctcaccgcgcctccctctccggcggcgcgaatgaacatcttattggctatcacatccgacacaaatgttgccatcccattgcttaatcgaataaaaatcaggctacatgggtgctaaatctttaacgataacgccattgaggctggtcatggcgctcataaatctggtatacttacctttacacattggggctgattctggattcgacgggatttgcgaaacccaaggtgcatgccgaggggcggttggcctcgtaaaaagccgcaaaaaatagtcgcaaacgacgaaaactacgctttagcagcttaataacctgcttagagccctctctccctagcctccgctcttaggacggggatcaagagaggtcaaacccaaaagagatcgcgtggaagccctgcctggggttgaagcgttaaaacttaatcaggctagtttgttagtggcgtgtccgtccgcagctggcaagcgaatgtaaagactgactaagcatgtagtaccgaggatgtaggaatttcggacgcgggttcaactcccgccagctccaccaaaattctccatcggtgattaccagagtcatccgatgaagtcctaagagcccgcacggcgcaagccctgcgggcttttttgtgccctcaatttgtcccgcgaagtccgaagagaactaattaaatccgaaccttttaggcccattgataggcccaacgaaaagctctattgtttacgttgggctaaacgcagggagactccccacctttgaaaacaggatgtagcgatgaaacttaacgacagtaacttattccgccagcaggcgttgattaacggggaatggctggacgccaacaatggtgaagccatcgacgtcaccaatccggcgaacggcgacaagctgggtagcgtgccgaaaatgggcgcggatgaaacccgcgccgctatcgacgccgccaaccgcgccctgcccgcctggcgcgcgctcaccgccaaagaacgcgccaccattctgcgcaactggttcaatttgatgatggagcatcaggacgatttagcgcgcctgatgaccctcgaacagggtaaaccactggccgaagcgaaaggcgaaatcagctacgccgcctcctttattgagtggtttgccgaagaaggcaaacgcatttatggcgacaccattcctggtcatcaggccgataaacgcctgattgttatcaagcagccgattggcgtcaccgcggctatcacgccgtggaacttcccggcggcgatgattacccgcaaagccggtccggcgctggcagcaggctgcaccatggtgctgaagcccgccagtcagacgccgttctctgcgctggcgctggcggagctggcgatccgcgcgggcgttccggctggggtatttaacgtggtcaccggtagcgcgggcgcggtcggtaacgaactgaccagtaacccgctggtgcgcaaactgagctttaccggtagcaccgaaattggccgccagttaatggaacagtgcgcgaaagacatcaagaaagtgagcctggagctgggcggtaacgcgccgtttatcgtctttgacgatgccgacctcgacaaagccgtggaaggcgcgctggccagcaaattccgcaacgccgggcaaacctgcgtctgcgccaaccgcctgtatgtgcaggacggcgtgtatgaccgttttgccgaaaaattgcagcaggcagtgagcaaactgcacatcggcgacgggctggataacggcgtcaccatcgggccgctgatcgatgaaaaagcggtagcaaaagtggaagagcatattgccgatgcgctggagaaaggcgcgcgcgtggtttgcggcggtaaagcgcacgaacgcggcggcaacttcttccagccgaccattctggtggacgttccggccaacgccaaagtgagcaaagaagagacgttcggccccctcgccccgctgttccgctttaaagatgaagctgatgtgattgcgcaagccaatgacaccgagtttggccttgccgcctatttctacgcccgtgatttaagccgcgtcttccgcgtgggcgaagcgctggagtacggcatcgtcggcatcaataccggcattatttccaatgaagtggccccgttcggcggcatcaaagccagcggtctgggtcgtgaaggtagcaagtatggcatcgaagattacttagaaatcaaatatatgtgcatcggtctttaactggagaatgcgaatgaacagcaataaagagttaatgcagcgccgcagtcaggcgattccccgtggcgttgggcaaattcacccgattttcgctgaccgcgcggaaaactgccgggtgtgggacgttgaaggccgtgagtatcttgatttcgcgggcgggattgcggtgctcaataccgggcacctgcatccgaaggtggtggccgcggtggaagcgcagttgaaaaaactgagccacacctgcttccaggtgctggcttacgagccgtatctggagctgtgcgagattatgaatcagaaggtgccgggcgatttcgccaagaaaacgctgctggttacgaccggttccgaagcggtggaaaacgcggtaaaaatcgcccgcgccgccaccaaacgtagcggcaccatcgcttttagcggcgcgtatcacgggcgcacgcattacacgctggcgctgaccggcaaggtgaatccgtactctgcgggcatggggctgatgccgggtcatgtttatcgcgcgctttatccttgcccgctgcacggcataagcgaggatgacgctatcgccagcatccaccggatcttcaaaaatgatgccgcgccggaagatatcgccgccatcgtgattgagccggttcagggcgaaggcggtttctacgccagcagcccagcctttatgcagcgtttacgcgctctgtgtgacgagcacgggatcatgctgattgccgatgaagtgcagagcggcgcggggcgtaccggcacgctgtttgcgatggagcagatgggcgttgcgccggatcttaccacctttgcgaaaagcatcgcgggcggcttcccgctggcgggcgtcaccgggcgcgcggaagtaatggatgccgtcgctccaggcggtctgggcggcacctatgcgggtaacccgattgcctgcgtggctgcgctggaagtgttgaaggtgtttgagcaggaaaatctgctgcaaaaagccaacgatctggggcagaagttgaaagacggattgctggcgatagccgaaaaacacccggagatcggcgacgtacgcgggctgggggcgatgatcgccattgagctgtttgaagacggcgatcacaacaagccggacgccaaactcaccgccgagatcgtggctcgcgcccgcgataaaggcctgattcttctctcctgcggcccgtattacaacgtgctgcgcatccttgtaccgctcaccattgaagacgctcagatccgtcagggtctggagatcatcagccagtgttttgatgaggcgaagcagtaacgccgctcctatgccggaggcgacgctgcgcgtcttgtccggcctacggggatccaggtcggataaggcgtttacgccgcatccgacaatctgtacgtgaacaggaagaaatctatgttggccgggtaaggcggagccgctctccggcaaaaagaatcaataacaattatacgcgtgacccggcgcgggaaatgtcggggcgctctcccaagtgacacactttcgagaggattcaggatggggcaaagtagccaaccacatgagttaggcggcgggctgaagagtcgccacgtcaccatgttgtctattgccggtgttatcggcgcaagtctgtttgtcggttccagcgtcgccatcgccgaagcgggcccggcggtattactggcctatctgttcgccgggctactggtggttatgattatgcggatgttggcggaaatggcggttgccacgcccgataccggtagcttttccacctatgccgataaagccattggtcgctgggcgggctataccatcggctggttgtactggtggttttgggtactggttatcccgctggaagccaacatcgccgccatgatcctgcacagttgggttccaggcattcccatctggttattttccctcgtcattaccctcgccttaactggcagtaacttattaagcgttaaaaactacggcgaatttgagttctggctggcgctgtgcaaagtcatcgctatcctggcctttattttccttggtgcagtcgcaattagcggtttttacccgtatgccgaagtgagcgggatcagtagattgtgggatagcggcggctttatgcccaacggtttcggtgcggtattaagcgcgatgttgatcaccatgttcagctttatgggcgcagaaattgtcaccattgccgccgcggaatccgacacgccggaaaaacatattgtccgcgccaccaacagcgttatctggcgtatttctatcttctatttatgttctatttttgtcgtcgtggcattaattccgtggaatatgcccggactaaaagccgtcggttcttatcgcagcgtactggaattgctcaatattccccatgcgaaattaatcatggactgcgtgatattactttccgtaaccagttgcctgaacagcgcgctgtataccgcgagtaggatgctctactccttaagtcgtcgcggtgatgctcccgcggtaatgggtaaaatcaaccgcagtaaaaccccgtacgtggcggtgttactctccaccggcgcggcattcttaacggtggtggtgaactattacgcgcctgcgaaggtatttaaatttctgatcgacagctccggcgctatcgccctgctggtttatttagtcatcgccgttagtcagttgcggatgcgcaaaattctgcgagcagaaggaagcgaaattcgcttgcgaatgtggctttatccgtggctcacctggctagtcatcggctttattacctttgtgttggtagtgatgctattccgtccggcgcaacagttagaagtgatctccaccggcttattagcgatagggattatctgtaccgtgccaattatggctcgctggaaaaagctggtattgtggcaaaaaacacccgttcataatacgcgctgatcatgatcaggagtcacaccatgaccattacgtctctggatggctatcgctggctgaagaacgatattattcgcggtaattttcaaccggatgaaaaattacgaatgagtttgctgacaagccgttatgcacttggcgttgggccgttacgggaagctcttagccaactggtggcggaacggctggtcacggtggtgaatcaaaaagggtatcgggtggcgtctatgagtgagcaggagctgctcgatattttcgacgcccgcgccaatatggaagcgatgttagtgagtctggcgattgcccgcggtggcgatgagtgggaggcagacgttctcgcaaaagcgcatctgctgagtaagcttgaggcctgtgacgccagcgagaaaatgcttgatgagtgggatctgcgtcatcaggcgtttcatacggcaattgtggcgggctgtggttctcactatttgctgcaaatgcgtgaacggttgtttgatctggcggcgcgttatcgatttatctggctgcggcgaacggtgcttagcgtggaaatgctggaggataaacacgatcagcaccagaccctgactgcggcggtactggcgcgagataccgcgcgcgccagtgagttaatgcgccagcatttactgacgccaattcccattatccagcaggcgatggctggcaattaattactcttccggaatacgcaacacttgccccggataaattttatccgggctttttagcatcggtttattcgcttcgaagattttattgtacagattagcgttaccgtagacctgtttggaaatggcactcagagtgtcgccagacttaacggtataaaactggctggcagtggctggtgtcgccgttttcacctgatcatcgacactggcaataccggaaatattccccaccgcaacaaggattttctccttcgcctcctgactcaggccgtcaccagtgaccgtcgctttgccgtcggcaatttgaatattcactttatcggcatccggtataccggttttgttcagatgctcctgcaccttcttcgcctgatcgtctttatcgtgctgacctgtaaccgcgtcccagagtttttctccggcatctttcacaaaattgaacagacccatagctacctcattcgttaacggaaacactcagaaagtgtagcagaggaacgcggcgcgttaacgccgcggggatgagcacaggtttaatcgcgggtttgcacccagaacgcgtgaatcaaaccggggatatacccaagcagtgtcaacagaatattaataatgaacgcccaaccgaaccctttaccgagcagcacgccgagcggcggcagaatgatggtgatgacgattctccagaaacccatatgtactccctataagaaaattactcattgtttaaaaagagattttatctcttaagcgtagtaattttagcggagcctgccagtttcagcttacgcttttactctcatttacgctgctgaggctggtatatgttgcatttttagtttagagtttacttaatttagaaaatacttaaataaatatgactgaactcgcgcaattacaggccagtgccgaacaggcagcggccttattgaaagcaatgagccaccctaaacgattgctgattctgtgcatgcttagcggttcccccggcaccagcgcgggagagctgacgcgcattaccggactgagtgcctctgcgacaagtcagcatctcgctcgtatgcgggacgaagggcttatcgacagccaacgggatgcccaacgcattctatattccattaaaaatgaggcggtaaatgccattatcgccaccctgaaaaatgtctattgtccgtaaggagtcactatggctttgacaaccattagcccgcatgatgcacaagaattaatcgcacgcggcgcaaagttaatcgatattcgtgatgctgatgaatatcttcgtgaacatattcctgaagcagatctggctccattatccgtgctggaacagagtggtcttccggctaaattacgtcacgagcaaattatattccactgccaggcaggtaaacgcaccagtaataatgccgataaattagcagcgattgccgcccccgcagaaatctttttactcgaagatgggattgatggctggaaaaaagcaggattgccagtagcggtaaataaatctcaacccttgccgttaatgcgccaggtgcagatcgctgcgggtggtttaatattaatcggcgttgtactgggttataccgtaaatagcggtttcttcttattaagtggctttgttggtgccgggttactgtttgcaggaatcagcggtttttgtggaatggcaaggttgttagataagatgccgtggaaccaacgagcttgagaagcgacgccggacgcgccctagcagcgacatccggcctcagtaattagatcaggaaatcgtcgagagatttaccttctgccagcgcctgagcaattggcttcggtgtacggccctgaccggtccaggttttagtttcaccgttaacatcggtgaatttatatttcgccggacgcggctggcgttttttaccagcgcgtggtgcagcagcagagctattacccaataactcttccgggttaattccgtcagctttcatcagctccagccaggtgctaattttttcctggcgctctgccagttcacgctgctgctgttcttcttcttcacgtctttctttagtgacaaccctgaatttttcgagcatttcttcaagaacgtcaatggagaattcgcgagccatcgcacggagggtgcgaatgttatttaaactttgtaacattacggacataataaagaaaaccttttaacgccaaaacaaaaaaagtatttcgtcgcgtagtgtaagcgatcacttattatatttccacaaaatttaatctatttacagtcctgcgcgagattatttcagctgttattttctgaaactctcagaataatttcaagattatatattagccattttgatgagtaatttagattattggtgaacagagcggcgctctctgctcgctaattccgcaagcctgacaaaatcaaagtgaataaaaatgcaatataacagaataaaagaaaacatccatcactggtgctttctgctgttaatgtacattgtctggcataaaaaatgctgaaaatgacccagctactacatacaccgaattctctacgcttatagcgttacctcacccccaaactttcattagtgatattaaaggtaaggccatatctaattgatttaattaaaaataaatcatatcggcatgtaaaaatccacaatgtacaaaaaacgagccgttacggaatattttatctacaaaaactgactaaataaaaatttttcactaattgattagtcatagccagcgatatacgctatgcgaaaatgcagatggcaatgagatccactgctttcatctccattaacatcccattacgcttttattaaggagcattagcatgttcagtccgcagagtcgcttgcgtcatgcagttgcagatacgttcgcgatggttgtttactgttctgtcgtgaacatgtgtattgaagttttcctctccggaatgagcttcgaacagtctttttattccagattggtagcgattccggtgaacatcttaattgcatggccatacggtatgtaccgtgatctgtttatgcgcgcggcacgcaaagttagcccgagcggctggataaaaaatctggcggatatcctggcttatgtgacgttccagagtccggtgtatgtggcgatcttgttagtggtgggcgcagactggcatcagattatggcggcggtcagtagtaacatcgttgttagcatgttgatgggggcggtttatggctacttcctcgattattgccgccgactgtttaaagtcagccgttaccagcaggtaaaagcctgactcttcttttcgcgactggcatcgccagtcgcgtctttaactggcttcgccaaataaaccattcaaataacgttcaagcgcaacacggctactaaagccatgcgggataccgtaatgctcgtgtcgctcgcctgctaaatagagcggaaattgctggtaatgatcgcaagttttaatatcggaagcgggttcagccagtgtgctactgcgttcttttaatgttggatgaattaccagagcggtacgtcccattcgcgcttcgcgattaacatagacataattttccccacggcggtaaccatacgctttctgggttaccacatcgacagtaaaaccgactttttcaagtacgcgcgccacctcgtctggtcgtaaatacatatttgatcctcgttattatcaaccgcgggcctaccttacctgattgcgcattcacaacgctttcagaaaagtccataaagccgcgatgaacctcagttaagaaaattatggtctacactgaaaattacatcgaattctaatgggggatcatatgtttaaccgaccgaaccgcaacgacgttgatgatggcgtgcaggatatccagaatgatgtcaatcaattagctgacagcctcgaatctgtattgaagtcctggggcagcgacgccaaaggggaagctgaagccgcacgcagtaaagctcaggcattgctgaaagaaaccagggcgcgaatgcatggtcgtactcgcgtccagcaagccgcgcgcgatgccgttggctgcgcggattcttttgttcgtgaaagaccctggtgtagcgtgggtacagcagctgcggtaggtatttttatcggcgcactgttaagcatgcgcaaaagctaatgcaaaaatgataataaatacgcgtctttgaccccgaagcctgtcttcggggtttctttttgcctggtgaatcacaaaaatccccctaccccgtcacgctcatatccagggtaatttcgaccactatttgctatatattgtgtggttgaatcttttttcaactacatctagtatctctgtatcaacagagagacaacccgacgcgtatcatcgcgccgtatcttcattttaaacggaaatacgaatcatgcgcattactatttacactcgtaacgattgcgttcagtgccacgccaccaaacgggcgatggaaaaccggggctttgattttgaaatgattaatgtcgatcgcgttcctgaagcggcagaagcgttgcgtgctcagggctttcgtcagttgccggtagtgattgctggcgatcttagctggtctggtttccgtccggacatgattaaccgtctgcatccagcgccacacgcggccagtgcatgagccagctcgtctacttctccagcagctccgaaaacacgcagcgttttatcgaacgtttaggtctgcccgcggtgcgcatcccgctcaatgagcgggaacggattcaggtagacgagccttacatcctgatcgtgccctcttacggcggcggcggtacggctggcgcggtgccacgacaggtaattcgctttttaaacgacgagcacaaccgggcgttgcttcgcggcgttattgcttctggtaatcgcaactttggtgaggcgtatggccgcgccggagatgtgattgcccggaaatgcggcgtgccgtggctgtaccgttttgaactcatgggtacgcaaagcgatatcgaaaacgttcgtaaaggagtaaccgaattttggcaacgacaaccgcagaatgcctgacgcaggaaacgatggattaccacgcgctgaatgcgatgcttaacctctacgatagcgcaggtcgcattcagttcgataaagaccgccaggccgttgacgcctttattgcgacgcatgtgcgtccgaacagtgtgaccttcagtagccagcagcagcgcctgaactggctggtcaacgaaggttactatgatgaaagcgttcttaatcgctactctcgcgactttgtcattacgctgtttacccacgcacacaccagcggttttcgtttccagacattcctcggggcatggaagttttacaccagctatacgttgaagacattcgacggtaaacgttatctggaagattttgccgatcgagtaacgatggtggcgctgacgctggcacaaggcgatgagacgctggcgttgcaactgaccgatgaaatgctgagtggacgctttcagccagccacgccaacattcctcaactgcggtaagcagcagcgcggcgaactggtttcctgttttttgctgcgtattgaagacaatatggagagcattggtcgggcggtaaattccgcactgcagctgagcaaacgcggcggcggcgtagcatttttgctgagcaatctgcgagaagcgggcgcgccaattaaacgtattgaaaatcaatcttctggcgtaattccggtgatgaaaatgctggaagacgcattttcctatgccaaccaactcggcgctcgtcagggggctggtgcagtctatttacatgctcatcatcccgatattctgcgttttctcgacacgaaacgggaaaatgccgacgaaaaaatccgcattaaaacactgagccttggcgtggtgatcccggatatcactttccatctggcaaaagagaatgcgcagatggcgctgtttagcccttatgacgtagagcgagtttatggcaagccgtttgccgatgtggccatcagccaacactatgacgaactggttgccgatgaacgcattcgcaaaaaatacctcaacgcccgtgatttcttccagcgactggcagaaatccagtttgagtccggctatccctacatcatgtatgaagacacggtaaaccgtgctaaccctatcgccgggcgcataaatatgagtaatctctgcagtgaaattttgcaggttaacagcgccagtgagtatgacgagaatctcgactatacccgcacaggccatgatatttcctgcaatttaggtagcttgaatattgcgcacaccatggattcccccgattttgcccgcacggtagagactgccgtgcgcggtttaacggcagtaagtgatatgagtcatatccgcagcgtgccgtccatcgaagccggaaatgccgccagccacgccatcggactggggcagatgaatttacacggctatctggcgcgagaaggcatcgcttatggtagcccggaagcactggatttcaccaatctctatttctatgccatcacctggcatgcactgcgtaccagcatgttgctggcacgcgaacgcggtgaaaccttcgccgggttcaaacagagtcgctatgccagtggtgaatattttagccaatatctgcaagggaactggcagccgaaaacggcgaaagttggcgaactgtttacccgtagcggtattacgttacctacccgtgagatgtgggcgcagctgcgcgacgacgtgatgcgctacggcatatacaaccagaatcttcaggcggtgccgccaaccggttctatctcttatatcaaccatgctacgagcagtattcatccgattgtggcgaaagtagagatacgcaaagagggcaaaacaggacgcgtttactaccctgccccgtttatgactaacgagaatctggcgctgtatcaggacgcttacgaaattggcgcagaaaagatcatcgacacctacgcggaagcgactcgccatgtcgatcaggggctgagcctgacgctttttttccccgataccgccaccactcgcgatatcaacaaagcgcagatttacgcctggcgcaagggtatcaaaacgctctattacatccgcctgcgtcagatggcgctggaaggcactgaaattgaaggctgcgtctcctgtgcactttaaggaatatctatgaaactcagtcgtatcagcgccatcaactggaacaagatatctgacgataaagatctggaggtgtggaatcgcctgaccagcaatttctggctaccagaaaaggtgccgctgagcaacgatattcctgcctggcagacattaactgtcgtagaacaacaactgacgatgcgcgtttttactggcctgacgctgctcgacacgctgcaaaatgttatcggcgcgccttctctgatgcccgatgcactcacgcctcatgaagaagcggtattaagcaatatcagctttatggaagcggttcatgcccgctcttacagtagcattttcagcacgctatgccagaccaaagatgtcgatgccgcctacgcctggagtgaagaaaacgcaccgttgcagcgaaaagctcagattattcagcaacattatcgcggtgatgatccgctgaaaaagaaaatcgccagtgtgtttcttgaatcttttttgttctattccggtttctggctgccgatgtatttttccagccgcggaaagctgaccaataccgcggacctgatccgtctgattatccgcgatgaagcagtccacggttactacataggctataaatatcagaaaaacatggaaaagatatctctgggacaacgtgaagagttgaagagtttcgccttcgatttgttgctggaactctacgacaacgagttgcaatacaccgatgagctgtacgccgaaaccccgtgggctgacgatgtgaaagcgtttctctgttacaacgccaataaggctttgatgaatctgggctacgaaccgttatttcccgcagaaatggcggaagtgaatccggcaatcctcgccgcgcttagcccgaatgccgatgaaaatcacgatttcttttccggtagtggctcctcttatgtgatggggaaagcggttgaaacagaagatgaagactggaatttctgagggtgttattttcaaaaatatcactacccgcagcagggaaataattcccgccaaatagctttttatcacgcaaataatttgtggtgatctacactgatactctgttgcattattcgcctgaaaccacaatattcaggcgttttttcgctatctttgacaaaaaatatcaactttctcgatttgctctcagcccttatatcacgggaaattccggcgatttgctcgcatcaatattcatgccacatttgccatcaggggttgcctcagattctcagtatgttagggtagaaaaaagtgactatttccattgggtaatatatcgacatagacaaataaaggaatctttctattgcatggcaattaaattagaaattaaaaatctttataaaatatttggcgagcatccacagcgagcgttcaaatatatcgaacaaggacttagtaaagaacaaattctggaaaaaactgggctaagccttggcgtaaaagacgccagtctggccattgaagaaggcgagatatttgtcatcatgggattatccggcagcggtaaatccacaatggtacgccttctcaatcgcctgattgaacccacccgcgggcaagtgctgattgatggtgtggatattgccaaaatatccgacgccgaactccgtgaggtgcgcagaaaaaagattgcgatggtcttccagtcctttgccttaatgccgcatatgaccgtgctggacaatactgcgttcggtatggaattggccggaattaatgccgaagaacgccgggaaaaagcccttgatgcactgcgtcaggtcgggctggaaaattatgcccacagctacccggatgaactctctggcgggatgcgtcaacgtgtgggattagcccgcgcgttagcgattaatccggatatattattaatggacgaagccttcagcgcgctcgatccattaattcgcaccgagatgcaggatgagctggtaaaattacaggcgaaacatcagcgcaccattgtctttatttcccacgatcttgatgaagccatgcgtattggcgaccgaattgccattatgcaaaatggtgaagtggtacaggtcggcacaccggatgaaattctcaataatccggcgaatgattatgtccgtaccttcttccgtggcgttgatattagtcaggtattcagtgcgaaagatattgcccgccggacaccgaatggcttaattcgtaaaacccctggcttcggcccacgtagcgcactgaaattattgcaggatgaagatcgcgaatatggctacgttatcgaacgcggtaataagtttgtcggcgcagtctccatcgatagccttaaaaccgcgttaacgcagcagcaaggtcttgatgcggcgctgattgatgcgccgttagcagtcgatgcacaaacgcctcttagcgagttgctctctcatgtcggacaggcaccctgtgcggtgcccgtggtcgacgaggaccaacagtatgtcggcatcattagcaaaggaatgctgctgcgcgctttagatcgtgagggggtaaataatggctgatcaaaataatccgtgggataccacgccagcggcggacagtgccgcgcaatccgcagacgcctggggtacaccgacgactgcaccgactgacggcggtggtgctgactggctgaccagtacgcctgcgccaaacgtcgagcattttaatattctcgatccgttccataaaacgctgatcccgctcgacagttgggtcactgaagggatcgactgggtcgttacccatttccgtcccgtcttccagggcgtgcgcgttccggttgattatatcctcaacggtttccagcaattgctgctgggtatgcccgcaccggtggcgattatcgttttcgctctcatcgcctggcagatttccggggtcggaatgggtgtggcgacgctggttagcctgattgccatcggcgcaatcggtgcctggagccaggcaatggtgactctggcgctggtgttaaccgccctgctgttctgtatcgtcatcggtttgccgttggggatatggctggcgagaagtccgcgagcggcgaaaattattcgtccactgcttgatgccatgcagaccacgccagcgtttgtttatctggtgccaatcgtcatgctatttggtatcggtaacgtgccgggcgtggtggtgacgatcatctttgctctgccgccgattatccgtctgaccattctggggattaaccaggttccggcggatctgattgaagccagccgcagtttcggtgccagcccgcgccagatgctgttcaaagttcagttaccgctggcgatgccgaccattatggcgggcgttaaccagacgctgatgctggccctttctatggtggtcatcgccagcatgattgccgtcggcgggttgggtcagatggtacttcgcggtatcggtcgtctggatatggggcttgccaccgttggcggcgtcgggattgtgatcctcgccattatcctcgatcgtctgacgcaggccgttgggcgcgacagtcgcagtcgcggcaaccgtcgctggtacaccactggccctgttggtctgctgacccgcccattcattaagtaactctgcacttgcccggtgacgccgggcattatcaccctgccaaaaaaaggaataacaatgcgacatagcgtactttttgcgacagcgtttgccacgcttatctctacacaaacttttgctgccgatctgccgggcaaaggcattactgttaatccagttcagagcaccatcactgaagaaaccttccagacgctgctggtcagtcgtgcgctggagaaattaggttataccgtcaacaaacccagcgaagtagattacaacgttggctacaccagccttgcttccggcgatgcaaccttcaccgccgtgaactggacgccactgcatgacaacatgtacgaagctgccggtggcgataagaaattttatcgtgaaggggtatttgttaacggcgcggcacagggttacctgatcgataagaaaaccgccgaccagtacaaaatcaccaacatcgcacaactgaaagatccgaagatcgccaaactgttcgataccaacggcgacggaaaagcggatttaaccggttgtaaccctggctggggctgcgaaggtgcgatcaaccaccagcttgccgcgtatgaactgaccaacaccgtgacgcataatcaggggaactacgcagcgatgatggccgacaccatcagtcgctacaaagagggcaaaccggtgttttattacacctggacgccgtactgggtgagtaacgaactgaagccgggcaaagatgtcgtctggttgcaggtgccgttctccgcactgccgggcgataaaaacgccgataccaaactgccgaatggtgcgaattatggcttcccggtcagcaccatgcatatcgttgccaacaaagcctgggccgagaaaaacccggcagcagcgaaactgtttgccattatgcagttgccagtggcagatattaacgcccagaacgccattatgcatgacggcaaagccagtgaaggcgatattcagggacacgttgatggttggatcaaagcccaccagcagcagttcgatggctgggtgaatgaggcgctggcagcgcagaagtaatttttattcgggcggataaggcgtttttgccgcatccgccgttctgtgcacaatgcctgatgcgacgctggcgcgtcttatcatgcctacaaaccacatcgcacatttcaacaatctatctttcatcccatattcatcaacatccgctattattgatttccagcttaatcatcacctgatgaacaaaaataatgactaaacctaatcatgagcttagcccggcgctgatcgtgctgatgtctatcgccaccggtctggcggtagccagtaactattacgcccagccattgctcgacaccatcgcgcgtaacttttccctttccgccagtagcgcaggctttattgttaccgccgcgcagttgggctatgccgcaggtctactgtttcttgttcccctcggtgatatgtttgaacgccgccgcctgattgtcagcatgaccttactggcggcatgttgattaccgccagcagtcagtcgctggcgatgatgatcctcggtacggcattaaccggtttattcagtgtcgtggcacaaattctggttccgctggcagcgacgctggctagtccggataaacgcggcaaagtggttggcactattatgagcggtctgctgttggggatcttgctggcacggacagttgccggattgctggcgaatctcggcggctggcgcaccgtcttttgggttgctagcgtgttaatggcactgatggcgctggcattatggcgtggtctgccacaaatgaaaagtgaaacccacctcaactacccacagttgttgggttccgttttcagtatgtttatcagcgataaaattctgcgtacccgcgcgttgctgggctgcctgacctttgccaatttcagcattctctggaccagtatggcctttttgcttgccgctccaccttttaactacagcgatggtgtcattggtctgtttggacttgcgggagctgccggagcgttgggcgctcgtccggcgggcggttttgccgataagggcaaaagccaccacaccacaactttcggtctgctgctgctattacttagttggctggcgatctggtttggtcacacttccgtactggcgttgattatcggaatcctggtgctggatctcaccgtgcagggcgtgcatatcactaaccagacggtaatttatcggatacatcctgatgcgcgcaatcgcctgaccgcaggttacatgactagctactttattggcggtgccgccggtagcctaattagtgccagtgcctggcaacatggcggttgggctggcgtttgtctggctggcgcgacgattgccctggttaacttactggtctggtggcgaggttttcatcgtcaggaagccgcaaattaagcaatcagcaaccgttttcgtggctttacacttataagggtgttaagaagcccatcagtctgataaggttaagatattcattcagtctatttataatattaacaatcgttaagcgtacactctatggaaagccctactccacagcctgctcctggtagcgcgaccttcatggaaggatgcaaagacagtttaccgattgttattagttatattccggtggcctttgcgttcggtctgaatgcgacccgtctgggattctctcctctcgaaagcgtttttttctcctgcatcatttatgcaggcgcgagccagttcgtcattaccgcgatgctggcagccgggagtagtttgtggattgctgcactgaccgtcatggcaatggatgttcgccatgtgttgtatggcccgagtctgcgtagccgtattattcagcgtctgcaaaaaagcaaaaccgccctgtgggcgtttggcctgacggatgaggtttttgccgccgcaaccgcaaaactggtacgcaataatcgccgctggagcgagaactggatgatcggcattgccttcagtagttggagtagctgggtatttggtacggtaataggggcattctccggcagcggcttgctgcaaggttatcccgccgttgaagctgcattaggttttatgcttccggcactctttatgagtttcctgctcgcctctttccagcgcaaacaatctctttgcgttaccgcagcgttagttggtgcccttgcaggcgtaacgctattttctattcccgtcgccattctggcaggcattgtctgtggctgcctcactgcgttaatccaggcattctggcaaggagcgcccgatgagctatgaggttctgctgcttgggttactagttggcgtggcgaattattgcttccgctatttgccgctgcgcctgcgtgtgggtaatgcccgcccaaccaaacgtggcgcggtaggtattttgctcgacaccattggcatcgccagcatatgcgctctgctggttgtctctaccgcaccagaagtgatgcacgatacacgccgtttcgtgcccacgctggtcggcttcgcggtactgggtgccagtttctataaaacacgcagcattatcatcccaacactgcttagtgcgctggcctatgggctcgcctggaaagtgatggcgattatataacccacaagaatcatttttctaaaacaatacatttactttatttgtcactgtcgttactatatcggctgaaattaatgaggtcatacccaaatggatagtagctttacgcccattgaacaaatgctaaaatttcgcgccagccgccacgaagattttccttatcaggagatccttctgactcgtctttgcatgcacatgcaaagcaagctgctggagaaccgcaataaaatgctgaaggctcaggggattaacgagacgttgtttatggcgttgattacgctggagtctcaggaaaaccacagtattcagccttctgaattaagttgtgctcttggaagttcccgtaccaacgcgacgcgtattgccgatgaactggaaaaacgcggttggatcgaacgtcgtgaaagcgataacgatcgccgctgcctgcatctgcaattaacggaaaaaggtcacgagtttttgcgcgaggttttaccaccgcagcataactgcctgcatcaactctggtccgcgctcagcacaacagaaaaagatcagctcgagcaaatcacccgcaaattgctctcccgtctcgaccagatggaacaagacggtgtggttctcgaagcgatgagctaacgcgtcatctcgctcaaaaatccagatttataaaagaaaaaatgactggccagcatcgcaacatgctggcctttttggcaagcaggtcggctcagccgatgagttaagaagatcgtggagaacaatatgagcgcaaatgcggagactcaaaccccgcagcaaccggtaaagaagagcggcaaacgtaagcgtctgctcctccttctcaccttgctctttataattattgccgtagcgatagggatttattggtttttggtactgcgtcacttcgaagaaaccgatgacgcatacgtggcagggaatcaaattcaaattatgtctcaggtgtctggcagcgtgacgaaagtctgggccgataacaccgattttgtaaaagaaggcgacgtgctggtcactctcgacccgacagatgctcgccaggcgtttgaaaaagccaaaactgcactggcttccagcgttcgccaaacccaccagctgatgattaacagcaagcagttgcaggcgaatattgaggtgcagaaaatcgccctcgcgaaagcacaaagcgactacaaccgccgtgtgccgctgggcaatgccaacctgattggtcgcgaagagctgcaacacgcccgcgacgccgtcaccagtgcccaggcgcaactggacgtcgcgattcaacaatacaatgccaatcaggcgatgattctggggactaaactggaagatcagccagccgtgcaacaggctgccaccgaagtacgtaacgcctggctggcgctggagcgtactcgtattatcagtccgatgaccggttatgtctcccgccgcgcggtacagcctggggcgcaaattagcccaacgacgccgctgatggcggtcgttccagccaccaatatgtgggtggatgccaactttaaagagacgcagattgccaatatgcgtatcggtcagccggtcactatcaccacggatatttacggcgatgatgtgaaatacaccggtaaagtggttggtctggatatgggcacaggtagcgcgttcagtctgcttccagcgcaaaatgcgaccggtaactggatcaaagtcgttcagcgtctgcctgtgcgtatcgaactggaccagaaacagctggagcaatatccgctgcgtatcggtttgtccacgctggtgagcgtcaataccactaaccgtgacggtcaggtactggcaaataaagtacgttccactccggtagcggtaagcaccgcgcgtgaaatcagcctggcacctgtcaataaactgatcgacgatatcgtaaaagctaacgctggctaatccagaggtgcgtgtgatgcaacagcaaaaaccgctggaaggcgcgcaactggtcattatgacgattgcgctgagtctggcgacattcatgcaggtgctggactccaccattgctaacgtggcgatccccactatcgccgggaatctgggcagtagcctcagccagggaacgtgggtaatcacttctttcggggtggcgaatgccatcagcatcccgcttaccggctggctggcaaagcgcgtcggggaagtgaaactgttcctttggtccaccatcgcctttgctattgcgagctgggcgtgtggtgtctccagcagcctgaatatgctgatcttcttccgcgtgattcaggggattgtcgccgggccgttgatcccgcttagccaaagtctattgctgaataactacccgccagccaaacgcagcatcgcgctggcgttgtggagcatgacggtgattgtcgcgccaatttgcggcccgatcctcggcggttatatcagcgataattaccactggggctggatattcttcatcaacgtgccgattggcgtggcggtggtgttgatgacactgcaaactctgcgcggacgtgaaacccgcaccgaacggcggcggattgatgccgtggggctggcactgctggttattggtatcggcagcctgcagattatgctcgaccgcggtaaagagctggactggtttagtagtcaggaaattatcatccttaccgtggtggcggtggtggctatctgcttcctgattgtctgggagctgaccgacgataacccgatagtcgatctgagcttgtttaagagccgcaacttcaccatcggctgcttgtgtatcagcctcgcgtatatgctctacttcggcgctattgttctgctgccgcagttgttgcaggaggtctacggttacacggcgacctgggcaggtttggcctctgcgccggtagggattattccggtgatcctgagcccgattatcggccgcttcgcgcataaactggatatgcggcggctggtaaccttcagctttattatgtatgccgtctgcttctactggcgtgcctatacctttgaaccaggtatggattttggcgcgagcgcctggccgcagtttatccaggggtttgcggtggcctgcttctttatgccgctgaccaccattacgctgtctggtttgccaccggaacgactggcggcggcaagcagcctctctaactttacgcgaacgctggcggggtctatcggcacgagcataaccacgaccatgtggaccaaccgcgagagcatgcaccatgcgcagttgactgagagcgtaaacccgttcaacccgaatgcccaggcgatgtacagtcaactggaagggcttgggatgacgcaacagcaggcaagtggctggattgcccagcagatcaccaatcaggggctgattatttccgccaatgagatcttctggatgagtgccgggatattcctcgtcctgctggggctggtgtggtttgctaaaccgccatttggcgcaggtggcggcggaggcggtgcgcactaagtacaactaagccagttcatttgaactggcttttttcaattaattgtgaagatagtttactgattagatgtgcagttcctgcaacttctctttcggcagtgccagttcttcgttgctgttgatgcgtacgtcacgttccagaatgctacgcgcaatatcctgcgcttcctgcaagctgtgcatctggtaagtgccacactggtagacgttcagttccgggatctgattctgatcctgcactttcagcacgtcttccattgccgttttccaggcatcagcaacacgctgctcatctggcgtaccaatcagactcatataaaaaccggtgcggcagcccattgggctgatatcgataatctctacaccattaccgttaagatggttacgcataaaaccagcaaacaggtgctccagggtatggatccctctttctggcatcacttctttgttcggcacgcagaagcgcagatcgaacacggtgattgcgtcgccatgcggggtgttcattgttttcgccacccgaactgcaggcgcttccatccgggtatgatcgactgtgaagctatctaacaacggcatttagccacctccggtaatttttttaaaaattttctgaactctttcttcccaggcgagtctgagtatatgaaagacgcgcatttgttatcatcatccctgaattcagagatgaaattttggccactcacgagtggcctttttcttttctgtcaggcgtgtttttccagccacaccgcaaacggttcggtatcagcggcttccatttcctgctgacggcgttcagacgcctcgcgctcggctacaaaatcctcttcgcgcagaatttccagcggctcttcacgcagcagattacggtaggcttctgcaaatgctttgcctgttccgccaataccagtatcaatcatagaccttaagatacgggcagagaaagtcagatcgggattatcgaagcaggcaaccagttcatcacacactttctgatacgcttcgccgccgttaatactatccagcgtttgcgcgacgcgtttcagatcgcggaacagatctttacccacctgcggtaacgggaactgtgcggtttcgcagccgatacccagcgtcagacccggtttgcgaccttcgaggatcacccggttccagttaacgcgtgtacaggcaagttcgctactgctcatttccggtgcatcagccagcgcacaccagaccataaacaggtcgaggaatcgcacctgctgttcatctacaccaatcgggctgaacgggttgatgtccaggctacgcacttcaatatattcaatgccgccacgtaacagcgcatcagaagggctctcgccgctgcgggtaacgcgttttggacgaatcggcgcgtacagttcgttttcaatctgcaacacgttgctgttgatttgcagcctcttaccgtctttctcaataccaatcttcgcgtactcttcgcttggcgttttgattgcctgtttaaggcccgctacgtactcgtaaagatcgttgaaggtaataccaagattgctttggcttttattggtatagccgagatcgctcaaacgaagagaggtcgcatacggcaggtaatacataccgcactcggttttctcaaacggcaggctcgttggttttccttgcaggaaagaagaacaaatcgccggagatgcaccaaacagataaggaatgacccaaccgaaacgatagtaattgcggataacgcggaaatagcccgcagaaattttctctttggcatcagcgccgctgatatcaccgcacttcgcttgccagaatgccattggcaaagagaaattgtagtgcacgccggaaatggtttgcatcagcgcgccgtagcgatttttcagcccttcacgatacagcgttttaaagcgtccggtgttagaagtgccgtactgtgccagttcgatgtcctgaccttctgcgatgtagcatggcatacttaacggccacatccgctcatcgcccatattgcgcgccgtataacgatgcagatcgcgcataaaggtcagcatatgttcaatatcaccatccactggtgtaatgaattccagcaatgcttccgcaaaatcggtagtaatccatttgtgcgtcagtgcggaacctaatgcttcaggatgacctgttgttgccagtgtgccatcagcattaacacgcaaagtttcgcgctccagcccacgctgtatcccctttaacgcctgaggatgtttttccagccaggccagcgcctgacttacgtccgggatcaaattgacctcccgcctgtcaaaatcgttttaattagcataactgtaatggtgaccatatgtgcaggcctacaattagtgccaccacatcatgccctgaacggtcgctgctgcaactgcaacatagcgtaacgctttaccaaggcacaaaaaaaagattaccggtccccagctgatgcgcatccatcccgctaacagacacagtaaatcgccaaccacgggcatccagcttaataatagcgtgactgcaccatagcgtttcagccagccggtagctttctcttgccagcggcttgttttacgcaatggaaagaaacgcccaaggataacgttagttaaccctccaaggctattacccattgttgctgttaaaactaaaacccagggatgactgatcccggaaagcaacattgccaccagcacgacttcggagttgccgggtaatagtgtagcgctgagaaaactactggcaaacaagctgaaaaggcttaacgcttcactcacagcaagcgaacatccacggcgtccatgcctgctgcacgggccgcctgaataccgaaatcggcatcttcaaagaccacacactgcgtcggttgcacgcccatacgctgcgcgcacaacaaaaatgtgtctggcgcgggtttatggtgtttgacgtgatcggcagcgacgacggcgtcaaaataatggcgtaatcccaggtgcgccagcaatgcctcagcgatggcgctttcactccccgttcctacagccattgggcgacgaccatgccaacttttcaccacatcaacaagaggaagcggttcgacgctatccagcagcatacttcttactgcttctgttttttcacgcgctaacgcatgcgggtcgagatcggcctgattcagctcaataattgcctgagcaatacgccaggtggggcttccattaagcgcaatcatcgcctgaatatcgtactgaagaccgtagtgccctaatacttcgcgccacgctttacggtgcgtaggctccgtatccaggattgtgccatccatatcaaaaattaaacctgcataacgctcgtacatggtcttctcgcaagtcgaaaaatatgacgctactttagcgtaattgcttgattttgtcgctgatggcgaaggagaagaaaattcaggaaatggataaaggagttatttagaaatgagatatttttgaaggaaattttttggagaagatggtgcatccgggaggatgactcactgacgttcgcccttcgggccgttgctggcgcaacgttatccttcctggtgcctgcggttaataccgctatctcttcgataccttcattgctgaaggttacggagaatatggtgcatccgggaggattcgaacctccgaccgctcggttcgtagccgagtactctatccagctgagctacggatgcatcgggaaaacttattctactgctgatattgataccgctactaaagccatatcaattaagagatggtgcatccgggaggattactcgccttgcggctcgcccttcgggccgttgctaaagcaacgttatcatccctagtgcctgcggttaattccgctacctcttcgataccttcattgctgaagatttcggagaatatggtgcatccgggaggattcgaacctccgaccgctcggttcgtagccgagtactctatccagctgagctacggatgcatcgggaaatttattttactgctgatattgataccgctactaaagccatatcaagtaagagatggtgcatccgggaggattcgaacctccgaccgctcggttcgtagccgagtactctatccagctgagctacggatgcatcgggaaacttactttactgcagattttttgataccgctactaaagccgtatcaagtaagagatggtgcatccgggaggattactcgccttgcggctcgcccttcgggccgttgctaaagcaacgttatcctccctggtgcctgcggttattaccgccacctcttccataccttcatcgctgaaagtacgtagaatatggtgcatccgggaggattcgaacctccgaccgctcggttcgtagccgagtactctatccagctgagctacggatgcaaatggcggtgaggcggggattcgaaccccggatgcagcttttgaccgcatactcccttagcaggggagcgccttcagcctctcggccacctcaccacacgcctcttacgagtgcttcgaagaacttgtttatcgctcatcgtcgctgcgtggcgcacatattactttctgagacttataagtcaaacaatttttcctacacttttatcgtttgcacacttcacgttcaattagtctgtaaaaacgtcaaaaagagtgttttatcaacagaagaatggaggtctgacagatagtagtaatgcaaaaaaatggagacttaagttgaatgaacgggagtaaagcgaaaagactatagagtgaaggagaaattttgagggtgcgtctcaccgataaagatgagacgcggaaagattagtaactggactgctgggatttttcagcctggatacgctggtagatctcttcacggtgaacagaaacttccttcggggcatttacgccaatacgtacctggttgccctttacccctaaaactgtcacggtgacctcatccccaatcatgagggtctcaccaactcgacgagtcagaatcagcattctttgctccttgaaagattaaaagagtcgggtctctctgtatcccggcattatccatcatataacgccaaaaagtaagcaatgacaaacacattacatctaagcagtcatggcattacattctgttaaacctaagtttagccgatatacacaacttcaacctgactttatcgttgtcgatagcgttaatgcgaatgccgtgaagcgagtccacggcattgcctgacgcttatattattgcaatttcgcgctgacccagcctttcacactggctaacgctgcaggtaaggccgcagcatccgtaccaccggcttgcgccatgtcaggacgtccaccacccttgccgcccacctgctgagcgaccataccaatcagttcccctgctttcacacgatctgtgacgtccttagatacgcctgcaatcagagaaaccttaccttcgactaccgttgccagcacgataattgtgctccccagctgattttttaaatcgtcaaccatggtacgcaacattttcggctcaacaccgctaagctcgctaaccaacagcttaacaccattaacatcaattgccttactggaaagatttgcgctctcctgtgcggcagcttgttctttaagctgttgtaactctttttccagctgacgcgtacgttccagtacactgcgcactttatcagccagattattgctatcgcctttcagcagatgcgcgacttcgcttaagcgatcgctgtctgcatgaacggtggcgatagcaccttctccggttaccgcttcgatacgacgaacgcctgcagcagtaccgctttcagagatgatgcggaacagaccaatatcaccagtgcggctggcgtgagtaccgccacacaactcggtagagaaatcgcccatgctcagcacgcgtacgcgctcatcatacttctcgccgaacagcgccatcgcacctttcgctttcgccgcttcgagatccatgatgttggtttcgatcggcaaattgcgacgaatctgtgtgttcaccaggtcttcgaccgcacgaatctcttctggtttcatcgcttcgttgtgactgaagtcgaagcgcagcaccttgtcgttaaccagactacctttctggcttacatgagtacccagaacctggcgcagcgcagcgtgcatcaggtgcgttgcggagtgattcagacgaatacgggcgcgacgagcctcatcaacatcagcctgcaccgcgtcgcccactttcagagaacccgcagcaagtttaccgatgtgaccaatcgcctggccgtatttctgcgtatcttccaccgcaaaggagaagttagcgcctttcagttcgcctttatcgccaacctgaccgccggattccgcatagaatggcgtttgatccagcacgaccacagcttcctggcctgcattgatggcatcaaccgctttaccatcaacaaacagcgcagtcactttgccgttcagttccagatggtcatagcctttaaattcagatgcactgtcaacacggatcattgcgttgtaatcggcaccaaagccgctggcttcgcgcgcgcgacgacgctgctcttccattgcagcttcaaaaccagcttcgtcaactttgatgttgcgctcacgacaaacatcagccgtcaggtcaaccgggaagccataggtgtcgtacagacggaaagcagtttcaccatccagcgtatcaccagaaagttttgccagctcttcatccagcaacgccagaccgcgctccagagtacgagcaaactgctcttcttcagtcttcagcacctgctcaacctgcgcctgctggcgtttcaggtcttcacccgcagagcccataacgtcgatcagcggaccaaccagtttgtagaagaaggtttctttcgcgccgagcatattaccgtgacgcactgcgcgacgaatgatacgacgcagtacataaccacggttttcattggacggcattacgccatccgcgatcaggaacgcacaagaacgaatgtggtcagcgattacgcgcaggcttttattgctcagatcggttgcgccagtgactttcgctaccgcctggatcagcgtgcggaacaggtcgatgtcatagttagagttaacgtgttgcagcaccgcagcaatacgctccagacccataccggtatctacagacggcttcggcagcggttccatcgtgccatcggcctggcggttgaactgcatgaagacgatgttccagatctcaatgtagcggtcgccgtcttcttccgggcttcccggagggcccccccaaatgtggtcgccgtgatcgtagaagatttcggtgcacgggccgcacggaccagtgtcacccatctgccagaagttgtcagatgcgtatggcgcacctttgttatcgccgatgcgaataatacgttcgcgcgggatccctacttctttttcccagatttcgtaggcttcgtcgtcgctttcatagacggtaacccacagacgctctttcggcagggcaaaccatttttcgctggtcagcagttcccatgcaaactgaatggcatcgtgtttgaaatagtcgccgaagctgaagttgcccagcatttcgaagaaggtatggtgacgcgcggtgtaaccgacgttttccaggtcgttgtgtttaccacccgcacgcacgcagcgttgggaagtggtagcgcgggaataattacgcttgtcgagcccaaggaacacatccttgaactggttcatcccggcgttggtaaacaacaaagttgggtcgttatggggtaccagggagctgctggcaactacctgatgtcccttactatggaaaaagtcgagaaacgcctgacggatctcagcggtgctcttgctcataattatcctgaaatcaagctaacgaaatatcgccaccagctccagcgtgtcttaaccgccgggctggtaactgaaaagtgggaataagataagttttcttgactgggaagtaaaataccgtatgcgttcagtcggcaaaatttcgccaaatctcctggatatcttccatcagatagccacgatagagcagaaaacgctggatcttaactttttcactaaagacagttggcaaaggttcgccatattttcgcgtcgcctgatcgcgcgccagtgcgcaccagtcgatgtcacattcacgcatcgctttttctgtcgcttcgcgggaaatacctttctgattcagttcctggcgaatacgcgcaggtccataacctttgcggctacggctggcgataaagcgcgcaacaaatcggctgtcatcgagatagccatgttcatggcaccaggcaataacgcgctcgtaatcttctgccgtagcatcaatctcttctgggccatttttgcccataatcggtgccgcgagtttacgtcgcagttcttgctcactgtgatcgcgcaccgccagaatgcgtaccgcacgatccaacaggcgagcatatgccgggcgacgggatgtactttctgtcatggcatatccttacaacttaaaaaagcaaaagggccgcagatgcgacccttgtgtatcaaacaagacgattaaaaatcttcgttagtttctgctacgccttcgctatcatctacagagaaatccggcgtactgttcgggttgctcagcagcaactcacgtactttcttctcgatctctttcgcggtttccgggttatctttcagccaggcagtcgcattcgctttaccctgaccgatcttctcacctttgtagctgtaccacgcgcctgctttctcgatcagcttctcttttacgcccaggtcaaccagttcgccgtagaagttgataccttcgccgtagaggatctggaattcagcctgtttaaacggcgcagcgattttgttcttcaccactttcacgcgggtttcgctacccaccacgttttcgccctctttcaccgcgccgatacgacggatgtcgagacgaacagaggcgtagaatttcagcgcgttaccaccggtagtggtttccgggttaccgaacatcacaccaattttcatacggatctggttgatgaagatcagcagcgtgttggactgcttcaggttacccgccagcttacgcatcgcctggctcatcatacgtgccgcaaggcccatgtgagagtcgccgatttcgccttcgatttccgctttcggcgtcagtgccgccacggagtcaacgacgataacgtctactgcgccagaacgcgccagggcgtcacagatttccagtgcctgctcgccggtgtccggctgggagcacagcaggttgtcgatatcgacgcccagtttacgtgcgtagattgggtccagcgcgtgttcagcatcgataaacgcacaggttttaccttcacgctgcgctgcggcgatcacctgcagcgtcagcgtggttttaccggaagattccggtccgtagatttcgacgatacggcccatcggcagaccacctgccccaagcgcgatatccagactaaggctaccggtagagatggtttccacatccatggaacggtcttcacccaggcgcatgatggagcctttaccaaattgtttctcaatctggcccagtgctgccgccaacgctttctgtttgttttcgtcgatagccatttttactcctgtcatgccgggtaataccggatagtcaatatgttctgttgaagcaattatactgtatgctcatacagtatcaagtgttttgtagaaattgttgccacaaggtctgcaatgcatacgcagtagcctgacgacgcaccgcatcacggtcgccgctgaagcattcccgccgggtaatgccttcaccgcgggcagtggcaaaagcaaaccagacggtgccgacaggcttctcttcactgccgccatccggcccggcgataccactaatagacacggcataatcagcacgagccgctttcagtgcgcctatcgccatttccaccacgacgggttcactcaccgcgccatgctgcgccagcgtctcttcgcgtacgccgatcatctgcgctttggcttcgttactgtaggtgacaaatccgcgttcaaaccaggcggagctaccggcaatatcggtaatcactttcgctacccaaccaccggtacaagactcggcagttgttacggttgcgccacgggctttcagcgcctgcccaacctgttcacttaactgcatcagttcactgtcagtcatcacaacctctgtcagtcaaaaatttatgccggacaagatagcactttcgtcaggaagatggtgttggcgttgcaattttacgaggaggattcagaaaaaagctgattagccagagggaagctcacgcccccctcttgtaaatagttactgtactcgcgccagcgccacggcttgtcctaactgccagaccgccattgcgtaatgggtgctgtggttgtaacgggtgatggtgtagaagttcggcagaccgtaccagtactggtagccggtgccaacatccagacgcagcaggctggcttgttgatggttgcccagcggctgctgtggcgttaaacctgcggcggcaagctggctaatgctgtacttagttttgaagccatttggcaagcctggagcctgaccgtttgccattaccgcgacctgatcgcctttcacccagccgtgcgctttgaaatagttcgccacgctaccgatcgcatcaaccggatcccacaggttgatatgcccgtcgccgctgaaatctaccgcatattgtttgtaagagctcggcataaactgtccgtagcccatcgccccggcaaaggaacctttcagattgagcggatcgtcctgctcgtcgcgcgccatcaacaggaaggtttccagctcgccagagaaatactccgcgcggcgtgggtagttaaaactcagcgttgccagcgcatcgaggatgcgagttttccccatcacgcgcccccagcgggtttcaacgccgataatcccgacgataatttccggcggtactccatacacctgccacgcgcgattcaacgcatcttcatactgattccagaaaaccacaccgttctgcacgttgtccggcgtaataaattttttgcgataacggagccatgcgccgttcggaccacttggcggtttcacgcttgtggttggtgcctggttatccatcagccgcagtacgctatccagacgcttcgcctgggagagaatttcctgcaactgctgacgatcgaaaccgtgtttgttcaccattttgtcgatgaactgctgggcattcgggttattagcgaaatcgccgcccatctgcatcacattgtgctgcggctcaagcaggaagccgccagacggcgttccggtggtcgtatcagtctcagtaggttttggcttgctgctacaggcggcaagcaacacaaaaaggggaagcaatgttacataacgacgcttgaacatgaggggtccatttaacagattcaaccaggggcaagtatggtaaagcatcacgccccgcacaaggaagcggtagtcactgcccgatacggactttacataactcaactcattcccctcgctatccttttattcaaactttcaaattaaaatatttatctttcattttgcgatcaaaataacacttttaaatctttcaatctgattagattaggttgccgtttggtaataaaacaataaatcctgaaggagagaacaatgatagaaaccattactcatggtgcagagtggtttatcgggctgttccaaaagggcggagaggtgtttaccgggatggtgaccggcattcttccgctgttgattagcctgctggttatcatgaacgcactgattaattttatcggtcagcatcgtattgaacgttttgctcaacgttgcgccggtaaccctgtttcccgttacctactgttaccgtgcattggcacgtttgtcttttgcaatccgatgaccctaagcctgggtcgctttatgccggaaaagtacaaacccagctactacgcggcggcctcttatagctgccacagtatgaatggcctcttcccccatatcaaccctggcgaactgtttgtttatcttggcattgccagcggtctgacaacgctgaacctgccacttggcccactggcggtgagttatctgctggttggtctggtcaccaatttcttccgcggctgggtgaccgatctgaccaccgccatttttgagaaaaagatgggcattcaacttgaacaaaaagttcacctggcaggagcaacaagttgaaataacacctggcaggagcaacatcatgacgcatattcggatcgaaaaaggaacgggtggctggggcggcccgcttgagctgaaagccacgccgggaaaaaaaatcgtctatatcaccgccggtacccggcctgcgattgttgacaaactggcacagcttactggctggcaggctattgacggatttaaagaaggtgaacccgcggaggtggaaattggtgtcgcggtaatcgactgtggcggcacattacgctgcggcatctatccgaaacgacgtattcccaccattaatatccacagcacgggcaagtccggtccgctggcgcagtacattgtggaagatatttatgtctctggcgtaaaagaagaaaacatcactgtagtaggtgatgcgacaccacaaccctcttccgtgggccgtgactatgacaccagtaagaaaatcaccgaacaaagcgatggtttactggcgaaggtgggaatgggcatggggtccaccgttgcggtgctgtttcaatctggtcgtgacaccatcgacactgtattaaaaaccattctgccgtttatggcattcgtcagcgcgctcattggcatcattatggcttctggccttggtgactggattgcccacggtcttgctccgctggcgagccatccactgggtctggtcatgctggcgctcatctgttccttcccactgcttagtcctttcctcggcccaggcgcagttatcgcacaggttatcggcgtattgattggcgtgcagattggtctcggcaatattccgccgcatctggctttaccggcactgtttgccatcaacgcgcaggcggcctgcgacttcatcccggtcggtttgagcctggcggaagcccgtcaggacacggttcgcgtcggtgtcccttctgtactggtgagccgctttttaaccggcgcgccgactgtactgatcgcctggtttgtctccggttttatctatcaataaaggctgaaacatgaccgttatttatcagaccaccatcacccgtatcggcgcgagtgccattgacgccctcagtgaccagatgctcatcacctttcgtgaaggcgcgcctgcggacctcgaagagtattgcttcattcattgccacggcgagttgaaaggtgcactccatcccggtttgcaatttagtctcgggcagcatcgctatccggtgaccgctgttggcagcgtggcggaagacaaccttcgcgaactgggtcatgtcaccctgcgcttcgatggtttaaacgaagcggaatttccgggcactgtccatgtggcaggccctgtccccgacgatatcgcgccgggaagcgttttgaagtttgaatctgttaaggagtaaaaaatgaatcaggttgccgttgtcatcggtggtgggcaaaccttaggcgcgttcctgtgccacggtctggctgccgaggggtatcgcgtcgcggttgtcgatattcagagcgacaaagccgcaaatgtggcacaagaaattaacgccgaatatggtgaaagtatggcgtacggttttggtgctgacgccactagcgagcaaagcgttctggcgctctctcgtggggtagatgaaatctttggtcgcgtggatttgctggtctacagcgccggaatagcaaaagcagcctttatcagcgacttccagctcggcgattttgaccgtagcctacaggtgaatctggtgggttatttcctgtgtgcgcgtgaatttagccgtttgatgatccgcgacgggattcaggggcgcattattcagatcaacagcaaatccggcaaagtgggcagcaaacacaactctggctacagcgcagcgaaatttggtggcgtcgggctgactcaaagtctggcgctggatctggcggagtacggcattacggtgcatagtctgatgctcggtaacctgctgaaaagcccgatgttccagagtctgttgccacaatacgcgaccaagctgggtatcaaaccggatcaagtcgagcagtattacatcgacaaagtaccgctcaaacgcggctgcgattatcaagatgtgctgaatatgctgctgttctacgccagtcctaaggcgagctactgcaccggacagagcatcaatgtcaccggcggtcaggtgatgttctgatcaacagcggagatccattaaggatctccgtgagactatagaatgcctgatgcgctacgctcatcaggcatacaggacttccgccactacattaaggaaaagttatggtatccgcactcatcaccgtcgccgttatcgcctggtgtgcgcaactggccttaggcggctggcaaatttctcgttttaaccgtgccttcgacacactatgccagcaagggcgggttggcgtgggccgttccagcgggcgctttaaaccgcgggtcgtggtcgccatcgcgctggacgatcagcagcgcatcgtcgacaccttgtttatgaaaggactgaccgtcttcgcccgaccgcaaaaaattcccgcaattaccggtatgcatgcgggtgatttacagcccgatgtgatctttccccatgatccactaagtcagaatgctctaagtttggcgcttaaactgaaacgtggataatttcgttgtgaatgttacttgcttgcgaagttatcattttgaaacctaaatcaggtaatcacgcccatgaaacctcgtcagcgtcaggccgccattctggagtatctgcaaaagcagggtaaatgcagcgttgaagaattggcgcaatactttgacaccacaggcacaaccattcgcaaagatctggtcattctggaacatgccggaaccgtcattcgtacttatggcggagtggtgttgaataaagaggaatccgatccgcctatcgatcataaaacactcatcaacacccacaagaaagagctgattgcagaagctgccgttagttttatccatgatggcgatagcatcattcttgatgctggcagtaccgttttgcagatggttcccctgctcagccgctttaataacatcacggtgatgaccaacagcctgcatatcgtcaatgcgctatccgaactggataacgaacaaactatcctgatgccaggcggaacgtttcgcaaaaaaagcgccagttttcacgggcaactggcagagaatgccttcgagcatttcaccttcgataaattgtttatgggcaccgacggcatcgatctcaatgcgggcgtaaccacctttaacgaggtttataccgtcagtaaggcaatgtgcaatgccgcgcgcgaagtgattttgatggcggacagtagtaagtttggccgtaaaagccccaacgtagtttgcagtcttgaaagcgtcgataagctgattaccgacgcaggtatcgatccggcgtttcgtcaggcgctggaagagaaagggatcgatgtgatcataaccggagagagcaatgagtgaagcactactgaacgcgggacgtcagacgttaatgctggagttgcaggaagcaagccgtttaccggaacgtctgggcgatgattttgttcgcgccgccaatatcatcctgcactgtgaaggcaaagtggtggttagcggaattggcaaaagcggccacattggtaagaaaatcgccgcaacgcttgccagtaccggcactccggctttttttgtccatccggcagaagcgctgcacggcgatctggggatgatcgaaagccgcgatgtgatgctgtttatctcttactccggtggcgcgaaggaactggatctgattattccgcgtctggaagataaatctatcgcgctgctggcgatgaccggcaaaccgacgagtccgctgggcctggcggcaaaagcggtgctggatatctccgtagaacgcgaagcctgcccgatgcaccttgcgccgacctccagcaccgtcaataccctgatgatgggtgacgcgctggcgatggcggtcatgcaggcgcgcggatttaatgaagaagattttgcccgctcccacccagccggggcactgggcgctcgcttgctgaataaagtgcatcatctgatgcgccgtgacgatgccatcccacaggtggcgttaaccgccagcgtgatggatgcgatgctggaactcagccgcaccggtctggggctggtggcggtatgtgacgctcaacaacaggtacaaggcgtctttaccgacggcgatttacgtcgctggctggttggcggcggcgcactcaccacgccagtcaatgaagcgatgacggtcggcggcaccacgttgcaaagccaaagtcgcgccatcgacgccaaagagatcctgatgaagcgcaaaatcactgccgcaccggtggtggatgaaaacggcaaactcaccggcgcaataaacctgcaggatttctatcaggccgggattatttaatccttcaatcccagacgtttcgccagccgatgcaggttggcgacgtcggtttccagcatccgcgcgcaggcagcccagttgtgatgattttgtgccagtgcctgacgaatagtttcacgctggaacgcttctgtcgcttcacgcaggttttgcttaacaacgggcaccgccgccacttctggcgtcggcaacgtcacctcaggaaaagcaaaatgttgcgcctcaagaatcacttcatcgccgctgcgggtggctctcgccagaactaccgcccgatgaatagcatgttccagttcgcgcacgtttcccggaaaactgtagtgttgcagtaaatttcgcgctccggcacttaataccacgcgggagagcccctgccgcaaacgacactgctcgcagaaataccccgccagcagaatgacatcatcgccccgctcacgcagcggcggcacgctaagtggaaacacgctcaggcgatgaaacaaatcggcgcggaatcgccctgccagcacctcttcgcgtaaatcgcggttagtcgccgccagcacgcgcacatcgacccgcaaacaacggtcatcgccaacgcgctgaatatcgccatactgcaacaccctcagcagcttggcctgcaatgccaagctcaactcgccgatctcatccagaaacagcgtgccgttatccgccatttcaaacttcccgctgcgattactgatagcgccagtaaacgctcctttcacatgcccgaacaactcactttccgccacactttccggcagtgcagcacagttgagatagaccagcggattcaccgcccgtgggctggcttcatgaatcgctttcgccaccagctccttaccggttccagtctcaccgctgatcaggacgttgagatcggacgccgccacaatctcaatctcttttttcagttgcgtcatgccaggggacaagccaatcatctgcgtctgtttcaccgcttcaaacggcgtggcatcgcctggcagcatattctggctttccagttgttcaatcagcaacgcattgcttaacgctcccgccgccagcgcagcaatcagccgtagctcttcgtcgctgaaaacatcgaactgatcgggctgcatcccgtcgagcgtcagtgcgccgatcaggttttgcccggcaaacaatggcagaccaacgcaggcgtgaaccttcagactctcctgcccaggaatcaaaccgtcatagggatcgggcaattcgctgtctgcgggaaagcgcaccacatccccggcgcgggcaatcgcttccagccgtggatgcccttccagcgcaaagcgtctaccgagtacatcctttgccagaccgtcgatggcaagcggaataaactgccggctatcgtaacgtagcaacgcagacgcatcgcactccagcacctgacgtagcgtggtgatcaggcgctgaaaacgatcctggtgaccaatcccacgctgcaattcgatggcgatattcgccagcacatcaacggaaaaactcatctttgcctcactgtcaatttgactatagatattgtcatatcgaccatttgattgatagtcattttgactactcattaatgggcataattttatttatagagtaaaaacaatcagataaaaaactggcacgcaatctgcaattagcaagacatctttttagaacacgctgaataaattgaggttgctatgtctattgtggtgaaaaataacattcattgggttggtcaacgtgactgggaagtgcgtgattttcacggcacggaatataaaacgctgcgcggcagcagctacaatagctacctcatccgcgaagaaaaaaacgtgctgatcgacaccgtcgaccataaattcagccgcgaatttgtgcagaacctgcgtaatgaaatcgatctggcggatatcgattacatcgtgattaaccatgcagaagaggaccacgctggggcgctgaccgaactgatggcacaaattcccgatacgccgatctactgtacagccaacgctatcgacagcataaatggtcatcaccatcatccggagtggaattttaatgtggtgaaaactggcgacacgctggatatcggcaacggcaaacagctcatttttgtcgaaacaccaatgctgcactggccggacagcatgatgacttacctgacaggcgacgcggtgctgttcagtaacgatgctttcggtcaacactactgcgacgagcatctgttcaacgatgaagtggatcagacggagcttttcgagcagtgccagcgttactacgccaatatcctgacgccgttcagccgcctggtaacaccgaaaattaccgagatcctgggctttaacttaccagtcgatatgatagccacttcccacggcgtggtatggcgcgataacccgacgcaaattgtcgagctgtacctgaaatgggcggctgattatcaggaagacagaatcaccattttctacgacaccatgagcaataacacccgcatgatggctgacgctatcgcccaggggattgcggaaaccgacccacgcgtggcggtgaaaattttcaacgtcgcccgaagcgataaaaacgaaatcctgactaatgtcttccgcagtaaaggcgtgctggtcggcactagcacgatgaataacgtgatgatgccgaaaatcgccgggctggtggaggagatgactggtttacgcttccgtaacaaacgcgccagtgctttcggctctcacggctggagcggcggtgcggtggatcgtctttccacgcgcctgcaggatgcgggtttcgaaatgagccttagcctgaaagcgaaatggcgaccagaccaggacgctctgaagttatgccgtgaacacggtcgcgaaatcgcccgtcagtgggcgctcgcgccgctgccgcagagcacggtgaatacggtagttaaagaagaaacctctgccaccacgacggctgacctcggcccacggatgcagtgcagcgtctgccagtggatttacgatccggcaaaaggcgagccaatgcaggacgttgcgccaggaacgccgtggagtgaagtcccggataacttcctctgcccggaatgctccctcggcaaagacgtctttgaagaactggcaagcgaggcaaaatgagtaacggcattgtgatcatcggtagcggcttcgccgcccgccaactggtgaaaaatattcgcaaacaggacgccactattccattaaccctgattgccgccgacagcatggatgagtacaacaaacctgacctcagccatgttatcagtcaggggcaacgtgccgatgaccttacccgccagacggcgggtgaatttgccgagcagtttaatctgcacctgtttccacaaacctgggtgacggatatcgatgccgaagcccgtgtggtgaaaagccagaataatcagtggcaatacgacaagctagtactggcaaccggtgccagtgcctttgtcccgcctgtgcctgggcgtgagttaatgctgacgttaaatagtcagcaagagtatcgcgcctgtgaaacgcaactgcgggatgcccgacgcgtgttgattgttggcggtggtttgattggtagcgaactggcgatggatttttgtcgtgcaggcaaagcggtcacgctaatcgacaacgctgccagtattctggcgagcttaatgccaccggaagtaagcagccgcttgcagcatcggttgacggagatgggcgttcatctgctgttgaaatctcagttacaggggctggaaaaaacggattctggcattcaggcaacgctggaccgccagcgcaatatcgaagtggatgcggtaattgccgccaccggactgcgcccggaaaccgccctggcacgacgcgccgggctgacgattaatcgcggcgtttgcgtcgatagttatctgcaaaccagtaataccgatatttacgcgctgggcgattgcgcggaaattaacggtcaggtattgccgttcctccagccgattcaacttagcgcgatggtgctggcaaaaaatcttctcggcaataacacgccgctgaaactcccggcgatgctggtgaaaatcaaaacgccggaattaccgctgcatctggcaggcgaaacccagcgtcaggatttacgctggcaaattaataccgaacgccagggaatggtggcgcgcggcgttgacgatgctgaccagcttcgcgcctttgtggtcagtgaggatcggatgaaagaggcatttggattgttgaaaacattgccgatgtaagtgggctactgtgcctaaaatgtcggatgcgacgctggcgcgtcttatccgacctacggggacgcatgtgtaggccggataaggcgtttacgccgcatccggcaatggtgtccaaatgcaacacgttttatccgttctggacttcacccgctaaccaacgcgccgcagcaataaccccctgccccagagacaaaccgccatcacccgccggtaaactctgtggaaagagcaatgtgaaatcagcgagataatgcgccagacgtgcacgcagcaaacggttatgaataaccccgccgctaaataccagcgtagtgataccacgcatcgtggcctgctcacgcatcaacgcggcaaaaccctgcgccagcgtatcatgaaacgcccacgcgcgttgattaaccggtgcctgccagttcagccactgctgccagaaagtggcgagatccagttgattgtccacccgcggcattgtcaccggatgcgtcactccgtggcaactggctgcgagcgcctccagagcacaagccgcttcaccttcataacttaacgtggctggcgcacagcccagtgccgccgccactgcatcgaaaaaacgcccacagctactcgccagcggcgcgttaattccacgctcaatggcccgcgccagcacgctccagttttgctgttgcacacttgctgtttcagagtaattctgccactccggcacaaagcgcaggcactgcgccagcaggtttcgccacggctgcttcgctgccaaatcgccacccggaagcgccactgcaggcaagccgcccaggtgctcacattcgcgatagttcacccgcaggcactcgccgccccacaaagcgccgttctcccccataccgataccgtcgagcgtcaaagcaatgacatcaccgccatccagcggccactgatgctctgccagacacgccgctgcatgggcatgatgatgcagtaccgtttgcgtcggcagattcatttcacgcgcccactggctggagacatagcccggatgcgcgtcatgcacaacgtattgcggggtaaaatcgtagatgttttgcatcaggcgtaacgcttcgcgccactgcatctggatgccatcgtcacttaaatcgcccagatgctgactcaacaccgcttgttcaccgcgcaccaggcagaaggtatttttcagatccgcgccgagacacagcacaggcggaacatttttaaagcccggaggcaaagccagcgcatccggcacatacccccggctacggcgcagcatttcgccgctttcgcgcaccacgctatcatccatccgctgcacgatgtcgcggttatgtatcaagaatccgtcggcaatgccctgcaaatccgccagcgcctgttcgttgctgatagctggtggtttaccgctcaggttgccggaggtcatcaccagcgggcattgcagttcctgtaacagcaaatgctggagcgggttcgcaggcaacattaccccgacttcgttaaggtcaggggcgatatcatcacaaagctcaggaacgtattttttatccaccagcacaatcggcgcggcgggcgtggtaagcaactggcgcgcagcgtctggtaaaccgtcagccactggcaacatgaccgccagcggtttcgccgggcgatgtttgcgcgcccgaagtgtcgccaccgcgttactgttacgtgcatcgcaggcaagatgaaatccgccaatccctttgatggcgacaattttgcccatttttaactgtgcgatagctgcctgtaatgccgcctcttgttccgcatgttcaccatgacttacccattcaagatgcgggccacactccgggcaggccaccggctgggcgtggaagcgacgatcgagcgggtcacggtactctttgtcacaggccggacatagcggaaacgccgccatcacggtaaacgggcggtcgtaaggcatggcgcgaataatggtgaaacgcgggccgcagtgggtacagttgataaacggataacgataacgccgttcgcctggggtattcatttcggcaaggcaagcagggcaagtagcggcatcgggaacaatttgcgtattcatggtgccgcctgtgctctggcgtatagtgaactcggtgggcagttgactccagataaacggctcacgctcgacgctatcaatacgcgccagcggcgggcagtgctgatacaattgaacaagaaacgtttccgggtcttcccgcagccggacttctacgccatcgccgtcattacagacatcgccgtgaagatttaattgctgtgccagctgccagacaaacggacgaaaaccgacgccctgcactttgccacgaatacgcagttggacaccgcaagatgtgttttttgccattgagttattcccgccatcatgaattgcgtaacccgccctgccggacacgacagcgtcgcatccggcagtcacaggtcggcgataccgcccgctccgtattctacgaatatttccgggaattcctttgatgccagaacagttctgtaagatttttagaacatcagcgccgtacggcggcgtttttctgcgctcagttgttcaagtttattacgatcgacacaaatcagcgcatgagtcgggcaagccgccatacacgccgggccgtcttcacgatggttgcacaggtcgcatttattggcttcggctttgtcagcccgtacattcagacccgcgccgctgttgcggatcaccggacgtaccaccacttccatcgcaccatacgggcaagccacaacgcaggttttgcaaccaatgcaacgttcctgcatcacatgaacaaaccctttatcacggctgatagcaccattcgggcagacgttagcgcacggtgcatcttcacactgacggcaaactgtcgccgtggaaatgttcacacctttaatgacatggatacgcggtaaaaaagtttccggggtcaggcttgcacagtcctgattttcctgatgagaaaccacgcacgctacttcacaggtacggcaaccaatacatttactcgcgtcagcaatgatgaaacggttcatcaaattctccagcaatgacagttaatgcgccgatacattcacaaatcatgccagtttttaatttactgttatttaaggaaattaatttctgtaatgcaggaaaaacgatgtcatcgacactagtgacgatgacatgtgatgacaatgtttatcggctaggagcaatgagactgtcgcggcggatcagttttccgctgaaggttttcggcggactgaaatccccgccatcgagcataaaaatcagccgtccaataatttcctgaatcatctcagtcaccggaatttttacgctggagagcgccggaacggtgtagggggcaatagcgatatcatcgaatccgataacactcacctgctctggcaccgctacgccgcgctcgtgtaacgctttcatcgcacctatcgccatatcgtcgttactggcaactaacgcgctaaatttagccccacgttcgagcaacatttctaccccttcggccccgctggcaggcgtccatttaccgttagcgataagtttttcattgagcgcaataccatgctgcgccagcgcgtctttatacccggcaagacgttcaatgttggtgggggaatccatgctgccggtaaggaaagcaatctcctgatgcccggcgtttatcaactctgccacggcgttaaaactggtctgtttatgatcgcaccagacgctatggctgctgtttttgcgcaggcggcgattaagcaccattatcggctgactgtgcgcgtcaatgatgtcatcgatctcatccacgcttaaaaaacgcgggtaaatcatgatcgcgtcgcagcgcagatccagcagatactgaatcgcctggcgctcttcttctgcgctgtgtttaccatctgccaatagcaactgccgccctttctcttccgccattcgcgcggcatgaaagagtaattcactaaaataaatgccgtggtaaagcgtgttggtcactaccagccccagcgtctgagtactcttcgcgctcagattgcgcgccagcaagtttggacggtaaccgctctcttctaccgcctgaaacacgcgatctttagtctcctggctgacgtagccattaccactaagcacgcgggaaacggtcgctttactaaccccggcgcgcttcgccacttccagcatcgtcgtcatcattttcatccctttacacgcaatcaacgcagtgtactgcaccgtttgccgattgtccttgcacaatcggcgggaaaaatattcaggtgaccggtttcacaaatataaaaaatgaacaattcactctcttgcttatttagtgacaactattcatgattttgtgaaaccggtttcttaattccgtttcagcatcggcatttttccgtcacgtcgactgataacaactacatctaccctactgataacaggataaaatccgatggccaaaaattatgcggcgctggcacgcagcgtgatagcggcactgggcggcgttgataacatcagcgcggtcacgcactgtatgacgcggttgcgctttgttatcaaagatgatgcacttatcgacagcccgacgttaaaaaccatccccggcgtgctcggcgtggtacgtagtgacaaccagtgtcaggtgattatcggcaataccgttagtcaagcctttcaggaagtcgtcagcctgctgccgggagatatgcagcccgcacagcccgtgggtaaacccaaactcacgctacgtcgcattggtgcggggatcctcgatgcgctgatcggcaccatgagtccgctgatcccggcgattatcggcggaagcatggtcaaactgctggcaatgatcctcgagatgagcggcgtgctgacaaaaggaagcccgaccttaaccattctgaatgtgattggtgacggtgctttcttcttcctgccgctgatggtcgcggcatctgccgccatcaaatttaaaaccaatatgagcctggcgattgccatcgcgggtgtgctggtacatccgagttttattgaactgatggcgaaagcggcccagggtgaacatgtcgaatttgccctgattccggtcaccgcggtgaaatacacctacacggtgatcccggcgctggtgatgacctggtgcctgagttatatcgaacgctgggtggacagcattacaccggcggtgaccaaaaacttcctcaaaccaatgctgattgtgttgattgccgcaccgctggcaatcctgctgattggcccgattggtatctggatcggtagcgccattagcgcgctggtttacaccattcatggttatctgggctggcttagtgtcgccattatgggcgcgctgtggcctctgctggtaatgaccgggatgcaccgcgtctttacgccaaccatcattcagaccattgccgaaaccggcaaagaagggatggtcatgccgagtgagatcggcgctaacctgagcctgggcggtagtagtctggcagtggcgtggaaaacgaaaaacccggaactgcgtcagacggcgctggctgcggcggcaagtgccattatggcggggatttccgaaccggcgttatatggcgtggcgatccgcctgaaacgtccgcttatcgccagtcttatcagcggttttatttgcggcgcggttgccggtatggcggggcttgccagccacagtatggcagcgccggggctatttaccagcgtgcagttcttcgatccggcgaatccaatgagcatcgtctgggtgttcgcggtcatggcgctggcggtggtgctgagctttatcctcacactgttgctcggctttgaggatattcctgttgaggaagcggctgcccaggcgcgaaagtatcagagcgtacaaccgaccgtcgccaaagaagtaagtcttaattgaggatgaaaatgagtgtatttccagaaagttttttatggggcggcgcgcttgccgccaaccagtctgaaggtgcgttccgtgaaggtgacaaaggtctgaccactgtcgatatgatcccacacggcgagcatcgaatggcggtgaaactggggctggaaaaacgttttcagttgcgagatgacgagttttatcccagccatgaggcgacggatttttatcatcgttataaagaagatatcgccctgatggcagagatgggattcaaggttttccgtaccagtattgcctggagccgtctctttccgcagggcgatgaaatcacgcccaatcagcagggcattgctttttatcgttctgtctttgaagagtgtaaaaagtacggtatcgaaccgctggtcacgttgtgccacttcgatgtgccgatgcatctggtcaccgaatatggctcctggcgtaaccgcaagctggtggagtttttcagccgctacgccagaacctgctttgaagcatttgatggtctggtgaaatactggctaaccttcaatgaaatcaacattatgttgcatagcccgttctccggcgcgggtctggtgtttgaagaaggtgaaaatcaggatcaggtgaaatatcaggccgcgcatcaccagctggttgccagtgcgctagccaccaaaatcgcccatgaggttaacccgcaaaatcaggtgggctgtatgctggcgggcggtaacttctacccttacagttgcaagccggaagatgtctgggcggcgctggagaaagaccgggaaaacctgttttttatcgatgtgcaggcgcggggcacgtatccggcttactctgcccgcgtattccgcgaaaaaggggtaaccatcaacaaagcaccgggcgatgatgaaatcctgaaaaacaccgtcgattttgtctctttcagctattacgccagccgctgcgccagcgcggagatgaacgccaacaacagcagtgcggcgaacgtggtgaaaagcctgcgtaatccgtatctacaggtgagcgactggggctggggaattgatccactcggtctgcgtatcaccatgaatatgatgtacgatcgttatcagaagccgctgtttctggtggaaaacggcctgggcgcaaaagatgaatttgctgccaatggcgagattaacgacgactatcgcatcagctacttacgcgaacatatccgcgcaatgggcgaagcgattgcagacggcattccgctgatgggctacaccacatggggctgtattgatttagtttccgcctctacgggtgaaatgagcaaacgctacggctttgtctttgttgaccgtgacgacgcaggcaacggtacgctgacgcgcacgcgtaagaaaagtttctggtggtataaaaaagtgattgccagtaatggggaagatttagagtaagtaacagtgccggatgcggcgtgaacgccttatccggcctacatgtcgcacgaaccatgaaggcccgataagcgcagcgcatcgggcaatttagcatttggcatcagagctggttcaccccatcaagaacatccctgtcctgattccttaatgaaaaattactcttcttccaccgctaactgcgcgaagccgccatttccttcccagccttccagtcgttgataaacggtttctaccgcatctttaatcggctgggtcatcgggtagtaaaagccgacgatatccggctgaatgccgaggaaaatcacttcgccaatatcttctttcaactggtcgataaggtaattcaacggcatgttatgggtagtcatcataaacatctcggcgatatcatccgggtcgatgatgcggatctcgccggggtttagccccatatccgtggcgtcgacaatcagcagtcgtgtcgggcgcagttcacggatagcgacgatgtcgttttccggtgcgctaccgccgtcaatcaccacccagttacctttcggcgcggcggcgcacttttccgccagcagcggacctgcgccatcatcgcccatcatgctattgccaacacagagtaaaacgtcagtcacgcagtctcctcaccatcaaatagatggcgttttcctgatgaatatcatgcagcatacttaacagcattgtactccattcctgctgctggctagtttgcgctgcccgggctttatcgaatgcgttggccagcatcggcacatggttaatgtcgatgacgatctcaccatatttcggcacgccttccattttgcggcgggcttcactgcctgcctccagagtggcaatccatgccagatattcatcccacgggcaggtgagcgccgcttccaggcaatcgataaccccaaggtggtgaccaatcgccaggctgtaatagaccacctgctgcgcctcggcgggcgtggcatcgttctcatcaataaatttatggctcagttgactgaacaccaccttttcactcatcggatacgcgcctcttcaacaacatgattcagatggctgacaatctcgttcagacgcggatcgttttccgcttccagccagcgtgcaacctgttcttcgccctgccctaactgtgtaaggtaatcatcggcaatctgacgaccgtaacgataacccgccaggcgacgtgcttcgcgatccactttcacgcgcagcggctgcaccatatcaccatgcaggatctccgccggttgttcatccagttcacccggcccacgggcgtgaattttctgctccagcaggccgagcgccattgcaaagccgtacagcgtggcggcaggcgttggcgggcagccagggatataaacatccacagggacaattttatccgtaccgccccacacgcagtagagatcgtggaagatcccgccactgttaccgcaggcaccgtaggagatacaaattttcgggtccggcgcggactgccacgcacgcagcgcaggggatcgcattgcacgggtgaccgcgccggtaaacagtaaaatatccgcatgacgcggactaggaacgactttaatgccgaagcgttctgcatcaaacagcgggctaagcgtggcgaaaatttcgatttcgcaaccgttgcagccgccgcagtccacgcggtaaacataggcagaacgtttgatttttttcagtaagctcgccttcatgctggcgatggattcatccaccgtcatggggaccggaatgccgttggcgtcacgggggcctaataaattgctcatcagatggcctctttcatatggcgagtcagttcaatacggtcggacggcaccaggcatttctggcgcttacattccgggcaagtctcaaagctttcgcggtggttttccgcgcggctgtcgccgttgtgcttaagcagcgcaatggcgtagtcgatctctttctggacggcgaaaggacgattgcagacgcggcagttgcacagcgcgaagcgggactgttgcaggaagtcttctttcttccacaccgccagttcgtactcttggctcagtttgatcgccgccgtcgggcagacttcttcgcagcgtccacagaagatgcagtgcccaagattaaactcccaggcaagctctcctgtggcgaggtcagtttcaaccgttaaggcgttactcgggcaggcattgacgcaggccgcgcagccgatgcactgctgcgggttctgctctggcttaccacggaagtttttatcaaccgcaatcggctccagcggataagagctggtcgccgtgccggttttgatgacttttttgataaaggtaaacatggcgattccttatttcagcgggctgtttttacgctcaatgctgtaacgctcgagttctttgtacggcaccactttgctcttcttcttacgcacatcgaccacggtcatgcggtcggtacaggagtagcaagggtcgaggctaccgataatcagcggcgcatcggaaacggtgttgccgcgcagcatgtagcgcagggtcggccagttcgcgtaggtcgcggcacggcagcgccagcggtacagcttctggttgtcgccggtcatgctccagtggatatcatcgccgcgcggcgcttcggcaaagcccagcgcaaagcggtgcggaatgtaggtaaagccttccaccatcagtgggccacccggcaggttatccagaccgtagtcgatcatgttcagcgcggtatagacttcgttgatacgcactttcagacgggaaataacgtcgcagccctgctcgctgtggacttccattggcagcaggccatagccgacaaacgggtgatcggcgcgggtatcacgggcgtgaccgctggcacggaccatcgggccgacgttactgaagtcgcgagcgatttccgggtccagacgaccaatgccgacagtgcgctgttccatgttcggagtgctcagcagcacatccaccagctcctgcacttcacgacgcatctgttgtgccagctggcgggtctggatcatgtcgtctttcagcagatcgcgacgaatcccgccgatcaagttcaggccgtaggttttacgcgcaccggtaaggatctctgccattttcatggaggtttcacgcacgcggaagaactgcataaagccggagtcgaagccggtaaagtgacaggccaggccaaggttgagcagatggctgtgcaagcgttctacctccagcagaatggcgcggatcatctgcgcacgttctggcacctgaatacccatcgcgttttccacgctcgtggtgtaggcggtgctgtgggcaaagccgcagatcccgcacacacggtcagagaggaaggtcacttcgttataacccatacgggtttccgccagtttttccatgccgcgatggacgtagaacagacggtagtcggcgtcgataatgttttcgccatcgacgaacagacggaagtggcccggttcatcagaagtgacgtgcagcggaccaatcggcacgacgttgtttttcttgtcgcccagttcgttgatgaactcgtaggtttcagcatcggtggtcggtgccggacgctgacgataatccatgctgtctttacgcagcggataaagttcatccggccagtcatccggcagcaccagacgacgttcatccggcagaccaaccggaatcaaaccgtacatatcgcgcacttcacgctcgccccacaccgccgccggaacgcgcggcgtcacggacggatattccggtttgttggcgtcaacttcgacgcgaaccgtaatccaacacttagtgcccttctccatgctcagcacgtagtaaacggcgtaatgaccattcagtttgcgttcgtcgttaccaaacagcacgctcagccagccaccctgtttgtagtaaagaaactccaccacttccggcaggtagttcacctttacggtgacagtcagctgatctttggtctgccaggcgtggtccagcacgacgcccggaaatgcctcattcagcgcggcgagataatgttgacctaatttttcttcagacatgctcaaactctctttaatcacgccgccagcaaggagacgaacgctaaaaatgcaaagccaaacccagcccaggtaatgcgcggagtaatatcaagacgcagacgggccatgctgttttcgaacagcgcgataaccaggacgccgaccaccagttttacgatggcaatcaccagcgccagcagcagtccaccggcggtgaaggtttccatttgtccccacggaataaacaccccgacgaacatctgcaacaccaccagctgtttcaggctgataccccatttcatgacgccaaagccgctgccgctgtattcagagagcgggccttcctgcagctcctgctcggcttccgccaggtcgaacggcagtttgcccatttcgataaaggtggcgaacgcacaggcacaaagcgccagtaccagcgggatgctctggctcagcggccagtgataaacggtgtcggtgatgttgctgatgttggtggaaccggcaacctgtgcggcaacccacagaccaagcagcagcatcggttcgaccagcacgccaagcatcgcttcacggctcgcgccgatagcggtaaacgggctaccggtatccagaccagaaatggcaaagaagaaacgcgcgatggcaaagagatacagtaaggtgatcaaatcacccagttgcggcagcggagaaccgacggtcaccaccggcagcgcagtagcgatagtcagcatgacgcccaccatcacatacggcgtcaggcggaacacccagccggaggcatccgggccgacgctctgacgccccagcagtttgataatgtcgcgatactcctgcaacacgcccggcccgcgacggttatgcaagcgggcgcgcgccacgcgggttataccggagagcagcggcgcaacggcaaataacaccagcgcctgaattaacggatataaaacactcattctcaggctcctcgactaacaataatcaccaccagtaccgccagttcaaccagcgccatccggcggaacagcaacgcactcccctcgcactgccagcccggcaccagagacaccggattcagccatttgcgtagtttcagcaccggcgcaaacgcctgtttcaccggcatggcaaaaccgtgagcggtaatcaccatacttttttcgtggtcgtaaccgcacacccaggccgcaccgcgggaacggcttggcaaacgatcgcctttgcaaatcgccataatgatgaatggcagcagcgggcaggcaatcagcagcaacgtgatcatcggttgagaaacggtggtgttagcaggctccagcggcagaggtacagcagcagagagcatcggcagtagccacggcgcagcaacaccgccaattacgcagcaaatcgccagtgccactacgcttacgctcatcaggagcggcgcacaggtggcgttttcggcttctttggtgcgcggcgcgccgaggaacgtgacgccatagactttcgccatacacatcaccgccagcgcaccggtaattgccagccccacagcgagcagcggccccagcagacgggcaacaaacgcgccactattgctcagtttgaaaaaactttgatagataacccattccccggcaaaaccattcagcggcggcagcgcagccattgccatcagcccgactaacatggcgatggagataaccggcattttcttgccaataccaccgagtttttcgatatcgcgatgaccggtacggaaccagacgctccccgccccgaggaacagtacgcttttgaacaggctatggttaagcagatggtacagaccaccgaccaggccaagagcaatcagcgccggttgttcgagcgcgatacccgttacgccagcgcccagccccagcaggatgatgccgatattttccagggtgtggtaagccagcaggcgctggatgttgtgctccaccagcgcatacagaccaccgacaaacgcggtgatcatgccgagcaccagcagcgcgatcccccaccacagcggtgcattaccgcccagcagactcagggttaaaatgcccagcaggccaattttcatgactaccgtagaaaacaacgcggcagctggcgcagaggcgttcgcatgtgcctgcggcacccagccgtgcagcggaataatcccggccagcaggccaaagccaatcactccgagcagccagatatcggaaccgagcggcagctgttgcatacgcatatccagcaggcgcagatccagcgtgccgtaacgctgccacagcagccagcaagcaatcgccagcagcagagtgccaagacgccccagcgcaaaccacagtttgccctctttgctgttgctggtgaggaacaccgcgcacagggccatgatttcggccattaccacgaacatgccgaggttgctggcaatgacggcgcagacggcggcagccatcaacatattgatctgcaagccgttgcacttcacctgcgcgtggcgatgccagtcaatgttgtagaggctgacaaacagaccgcacagaccgagcgtaatcagccaaatcgcgttaagcggagagatttgcacatcgtagcttaccaggctcagcgcaccgctcacgccaaccgcgccagtcagtacagtgaagcccgcggctgccgtatacagactaccaaccgcgccgccaattccagctatccagccacttaacgctttttgaaaagaaaagagaaatgccagaacagcggcggcgacaaaccacgccacgccgctattgatcagggaaattgcgctcatttagcctctccactttgagcctgctgaaacaaggtgagatcgccaaagtccgtgttaaaggtcagctcacgcttacgtttgctgacgcgggcgatatcggtgttatccaccagatgcagggctttagtcgggcacatccgcacgcaggccggaccttgttcatcaaagctacaaaggtcacatttgacggcgatcgcgcgaatacctggcacccagtcaagcaatgtgctgacacgcgccggagcaggcggtgccggtggcgctttcggggtattggcgtttgccggaatatccagcggacggctgccggaaaattcaattgcgccaaacgggcaggcgatgccgcacagcttgcagcttacgcacaggctttcattcaactgcacggccccatcgacgcgggtgatggcgttaaccgggcagaccaccgcgcagggtgcatcttcacagtggtgacagagctgcggcgcagattctttttcattcagcatcactctcaggcgcggcatactttgcaggccgtgctggcgatgcgtctcactacaggcggcctcacaagtgtggcagccgatacagagcgtggagtcagcaattacaaaacgattcaccaggcattcctcaggtgattgtcatttttgacgaaaacatgccgatgaaatgtcattttcgacactcatcgacacgcccatccccaaacaggcgtaacgcctgcaaaacgggcaaagcctcagctcatgctgccgggctttgtccctttaccagttggcttaaattcaccggcacattgttttcaatagcggtgtataagctgtcgtaaacgccagcgattttttcgagatagtgttccagaacctgttcgcgatcgcggatgttgaccttgccatcaatcatgccgtcaatgctcagttgcgcctgcgcaatccgctgtttgtcttcgccatcttttgtttcgacgtaatactcgatggtgtggctgttaaagccatccgccagggtgacgtaaatgcgaaaatgttcaaaaaggacgaaacagagttctttgtccggcgcgcagctcatggcgtgatgcaggcgcgctttgcttaacgtgatcccctgaaccaggctattgcagtagatgtgccactggtcctgtaggcgacgatgccgctgtgcgatgtaatcggctttctcgcttatttcccaaatagtcattgtcaggttacccgtttaacagagatgccagctttaagcattttttgtgccaacttttaatttattgttattaaagagatttttaagctaaagatgaatttcgtcgccgtgtcgacgtgtcatttcgacatcatcgacattattcaccgcagggataatcaacactggcacaattattgcttgtagctggcaatagttaatgggaggcgatatgcacgaaataaccctctgccaacgggcactggaattgatcgaacagcaggccgcaaaacacggcgcaaaacgcgtaactggggtctggctcaaaattggcgcattttcttgtgtcgaaaccagctctcttgccttttgttttgatctggtttgccgcggcagcgtggcggaaggttgtaaactgcacctcgaagaacaagaggccgaatgctggtgtgaaacatgccaacagtatgtgacgctactgacccagcgcgtccgccgctgtccacagtgtcatggtgacatgctgcagattgtggcagacgacggtttacagattcggcggatagaaatagaccaggagtgagcgatgtgtacaacatgcggttgcggtgaaggcaacctgtatatcgagggtgatgaacataaccctcattccgcgtttcgtagcgcgccatttgccccggcggcacgcccgaagatgaaaatcaccggcattaaagcgcctgaatttacccccagccagactgaagaaggcgacctgcattacggtcatggcgaagcgggcactcacgcaccgggcatgagccagcgtcggatgctggaagtcgaaattgacgtgctggacaaaaataaccgtctggctgaacgcaaccgcgcgcgctttgctgcccgcaagcaactggtgctcaacctggtttccagccctggttccggtaaaaccaccctgctgacggaaaccctaatgcgcctgaaagacagcgttccgtgcgcagttattgaaggcgaccagcaaaccgtgaacgatgccgcacgcattcgcgctaccggcacaccagcgattcaggtgaacaccggtaaaggctgccatcttgacgcacagatgattgccgacgccgcaccgcgtctgccactggacgataacggtattctgtttatcgaaaacgttggcaacctcgtatgcccggccagcttcgatctcggtgaaaaacacaaagtggcggtgctttccgttaccgaaggtgaagacaaaccactgaaatatccgcatatgtttgccgccgccagcctgatgctgctcaacaaagttgacctgttgccgtatctcaactttgacgttgaaaagtgcatcgcctgcgcccgcgaagtcaatccagaaattgaaatcatccttatttccgccaccagcggcgaagggatggaccagtggctgaactggctggagacacagcgatgtgcataaggtaaaactggctggagacacagcgatgtgcataggcgttcccggccagatccgcaccattgacggcaaccaggcgaaagtcgacgtctgcggcattcagcgcgatgtcgatttaacgttagtcggcagctgcgatgaaaacggtcagccgcgcgtgggccagtgggtactggtacacgttggctttgccatgagcgtaattaatgaagccgaagcacgcgacactctcgacgccttacaaaacatgtttgacgttgagccggatgtcggcgcgctgttgtatggcgaggaaaaataatgcgttttgttgatgaatatcgcgcgccggaacaggtgatgcagttaattgagcatctgcgcgaacgtgctagtcatctctcttacaccgccgaacgccctctgcggattatggaagtgtgtggcggtcatacccacgctatctttaaattcggcctcgaccagttactgccggaaaacgttgagtttatccacggtccggggtgcccggtgtgcgtactgccgatgggtagaatcgacacctgcgtggagattgccagccatccggaagtcatcttctgtacctttggcgacgccatgcgcgtgccggggaaacagggaagcctgttgcaggcaaaagcacgcggtgccgatgtgcgcatcgtttacagcccgatggatgcgttgaaactggcgcaggagaatccaacccgcaaagtggtgttcttcggcttaggttttgaaaccactatgccgaccaccgctatcactctgcaacaggcgaaagcgcgtgatgtgcagaatttttacttcttctgccagcacattacgcttatcccgacgttgcgcagtttgctggaacagccggataacggtatcgatgcgttcctcgcgccgggtcacgtcagtatggttatcggcaccgacgcctataattttatcgccagcgattttcatcgtccgctggtggttgctggattcgaaccccttgatctactacaaggcgtggtcatgctggtgcagcagaaaatagcggcccacagcaaggtagagaatcagtatcgtcgagtggtaccggatgccggtaacctgctggcgcaacaggcgattgccgatgtgttctgtgtcaacggcgacagcgaatggcgcggcttaggcgtgattgaatcttctggcgtgcacctgacgccggattatcaacgattcgatgccgaagcacatttccgcccggcaccgcagcaggtctgcgatgacccgcgcgcgcgttgtggtgaggtattaacgggcaaatgtaagccgcatcaatgcccgctgtttggtaacacctgtaatcctcaaaccgcgtttggtgcgctgatggtttcctccgaaggagcgtgcgccgcgtggtatcagtatcgtcagcaggagagtgaagcgtgaataatatccaactcgcccacggtagcggcggccaggcgatgcagcaattaatcaacagcctgtttatggaagcctttgccaacccgtggctggcagagcaggaagatcaggcacgtcttgatctggcgcagctggtagcggaaggcgaccgtctggcgttctccaccgacagttacgttattgacccgctgttcttccctggcggtaatatcggcaagctggcgatttgcggcacagccaatgacgttgcggtcagtggcgctattccgcgctatctctcctgtggctttatcctcgaagaaggattgccgatggagacactgaaagccgtagtgaccagcatggcagaaaccgcccgcgcggcaggcattgccatcgttactggcgatactaaagtggtgcagcgcggcgcggtagataaactgtttatcaacaccgctggcatgggcgcaattccggcgaatattcactggggcgcacagacgctaaccgcaggcgatgtattgctggtgagcggtacactcggcgaccacggggcgactatccttaacctgcgtgagcagctggggctggatggcgaactggtcagcgactgcgcggtgctgacgccgcttattcagacgctgcgtgacattcccggcgtgaaagcgctgcgtgatgccacccgtggtggtgtaaacgcggtggttcatgagttcgcggcagcctgcggttgtggtattgaacttagtgaagcggcactgcctgttaaacctgccgtgcgtggcgtttgcgaattgctgggactggacgccctgaactttgccaacgaaggcaaactagtaatagctgttgaacgcaacgcggcagagcaagtgctggcagcgttacattcccatccactggggaaagacgcggcgctgattggtgaagtggtggaacgtaaaggtgttcgtcttgccggtctgtatggcgtgaaacgaaccctcgatttaccacacgccgaaccgcttccgcgtatatgctaataaaattctaaatctcctatagttagtcaatgaccttttgcaccgctttgcggtgctttcctggaagaacaaaatgagttatacaccgatgagtgatctcggacaacaagggttgttcgacatcactcggacactattgcagcagcccgatctggccagcctgtgtgaggctcttagccaactggtaaagcgttctgcgctcgccgacaacgcggctattgtgttgtggcaagcgcagactcaacgtgcgtcttattacgcgagccgtgaaaaagacacccccattaaatatgaagacgaaactgttctggcacacggtccggtacgcagcattttgagccgccctgatacgctgcattgcagttacgaagaattttgtgaaacctggccgcagctggacgcaggtgggctatacccaaaatttggtcactattgcctgatgccactggcggcggaagggcatatttttggtggctgtgaatttattcgttatgacgatcgcccctggagcgaaaaagagttcaatcgtctgcaaacatttacgcagatcgtttctgtcgtcaccgaacaaatccagagccgcgtcgttaacaatgtcgactatgagttgttatgccgggaacgcgataacttccgcatcctggtcgccatcaccaacgcggtgctttcccgcctggatatggacgaactggtcagcgaagtcgccaaagaaatccattactatttcgacattgacgatatcagtatcgtcttacgcagccaccgtaaaaacaaactcaacatctactccactcactatcttgataaacagcatcccgcccacgaacagagcgaagtcgatgaagccggaaccctcaccgaacgcgtgttcaaaagtaaagagatgctgctgatcaatctccacgagcgggacgatttagccccctatgaacgcatgttgttcgacacctggggcaaccagattcaaaccttgtgcctgttaccgctgatgtctggcgacaccatgctgggcgtgctgaaactggcgcaatgcgaagagaaagtgtttaccactaccaatctgaatttactgcgccagattgccgaacgtgtggcaatcgctgtcgataacgccctcgcctatcaggaaatccatcgtctgaaagaacggctggttgatgaaaacctcgccctgaccgagcagctcaacaatgttgatagtgaatttggcgagattattggccgcagcgaagccatgtacagcgtgcttaaacaagttgaaatggtggcgcaaagtgacagtaccgtgctgatcctcggtgaaactggcacgggtaaagagctgattgcccgtgcgatccataatctcagtgggcgtaataatcgccgcatggtcaaaatgaactgcgcggcgatgcctgccggattgctggaaagcgatctgtttggtcatgagcgtggggcttttaccggtgccagcgcccagcgtatcggtcgttttgaactggcggataaaagctccctgttcctcgacgaagtgggcgatatgccactggagttacagccgaagttgctgcgtgtattgcaggaacaggagtttgaacgtctcggcagcaacaaaatcattcagacggacgtgcgtctaatcgccgcgactaaccgcgatctgaaaaaaatggtcgccgaccgtgagttccgtagcgatctctattaccgcctgaacgtattcccgattcacctgccgccactacgcgagcgtccggaagatattccgctgctggcgaaagcctttaccttcaaaattgcccgtcgtctggggcgcaatatcgacagcattcctgccgagacgctgcgcaccttgagcaacatggagtggccgggtaacgtacgcgaactggaaaacgtcattgagcgcgcggtattgctaacacgcggtaacgtgctgcagctgagtttgccagatattgttttaccggaacctgaaacgccgcctgccgcaacggttgtcgccctggagggcgaagatgaatatcagttgattgtgcgcgtgctgaaagaaaccaacggcgtggttgccgggcctaaaggcgctgcgcaacgtctggggctgaaacgcacgaccctgctgagtcggatgaagcggctgggaattgataaaagcgcattgatttaactgcaaattgccggacagatctgcctgtccggcatattattcatgaggttttttcggacgatatttttccggcagttctggcaccggacgcttgtcatcgatgagatgacgcacggttaagatcggatgacgccacagcattctcggcccggcccaacgcataatctgtttcatctcttcacgctttgcaggctggtaacagtgcaccggacactgcttacaggctggtttctcttcgccgaacacacatttatccagccgcttttgcgcgtaaacaaacaacgcctcgtaatgctccggctccgcactcgcctgcgggcatttcgcttgataaagatcgatcatttttttaatcgtcagtttttcacgagagatacgcttgccggacatgctgcctccacctcattaagatgtatttatattacatcttaatcttaaagggcactatgactccaaagaagaagggttagccaaccgatacaattttgcgtacttgcttcataagcatcacgcaaaagctgcaaaacagcatctttcccggaaccagcatcaagaactcgccgttcgcttcttcccctgaaatgattaactccggtatcatgtgcgccttatgtgattacaacgaaaataaaaaccatcacaccccatttaatatcagggaaccggacataaccccatgagtgcaatagaaaatttcgacgcccatacgcccatgatgcagcagtatctcaggctgaaagcccagcatcccgagatcctgctgttttaccggatgggtgatttttatgaactgttttatgacgacgcaaaacgcgcgagccaactgctggatattagtctgaccaaacgcggtgctagcgcgggagagccgatcccgatggcggggattccctaccatgcggtggaaaactatctcgccaaactggtgaatcagggagagtccgttgccatctgcgaacaaattggcgatccggcgaccagcaaaggtccggttgagcgcaaagttgtgcgtatcgttacgccaggcaccatcagcgatgaagccctgttgcaggagcgtcaggacaacctgctggcggctatctggcaggacagcaaaggtttcggctacgcgacgctggatatcagttccgggcgttttcgcctgagcgaaccggctgaccgcgaaacgatggcggcagaactgcaacgcactaatcctgcggaactgctgtatgcagaagattttgctgaaatgagcttaattgaaggccgtcgcggcctgcgccgtcgcccgctgtgggagtttgaaatcgacaccgcgcgccagcagttgaatctgcaatttgggacccgcgatctggtcggttttggcgtcgagaacgcgccgcgcggactttgtgctgccggttgtctgttgcagtatgcgaaagatacccaacgtacgactctgccgcatattcgttccatcaccatggaacgtgagcaggacagcatcattatggatgccgcgacgcgtcgtaatctggaaatcacccagaacctggcgggtggtgcggaaaatacgctggcttctgtgctcgactgcaccgtcacgccgatgggcagccgtatgctgaaacgctggctgcatatgccagtgcgcgatacccgcgtgttgcttgagcgccagcaaactattggcgcattgcaggatttcaccgccgggctacagccggtactgcgtcaggtcggcgacctggaacgtattctggcacgtctggctttacgaactgctcgcccacgcgatctggcccgtatgcgccacgctttccagcaactgccggagctgcgtgcgcagttagaaactgtcgatagtgcaccggtacaggcgctacgtgagaagatgggcgagtttgccgagctgcgcgatctgctggagcgagcaatcatcgacacaccgccggtgctggtacgcgacggtggtgttatcgcaagcggctataacgaagagctggatgagtggcgcgcgctggctgacggcgcgaccgattatctggagcgtctggaagtccgcgagcgtgaacgtaccggcctggacacgctgaaagttggctttaatgcggtgcacggctactacattcaaatcagccgtgggcaaagccatctggcacccatcaactacatgcgtcgccagacgctgaaaaacgccgagcgctacatcattccagagctaaaagagtacgaagataaagttctcaccagtaaaggcaaagcactggcactggaaaaacagctttatgaagagctgttcgacctgctgttgccgcatctggaagcgttgcaacagagcgcgagcgcgctggcggaactcgacgtgctggttaacctggcggaacgggcctataccctgaactacacctgcccgaccttcattgataaaccgggcattcgcattaccgaaggtcgccatccggtagttgaacaagtactgaatgagccatttatcgccaacccgctgaatctgagcccgcagcgccgcatgttgatcatcaccggtccgaacatgggcggtaaaagtacctatatgcgccagaccgcactgattgcgctgatggcctacatcggcagctatgtaccggcacaaaaagtcgagattggacctatcgatcgcatctttacccgcgtaggcgcggcagatgacctggcgtccgggcgcagtacctttatggtggagatgactgaaaccgccaatattttacataacgccaccgaatacagtctggtgttaatggatgagatcgggcgtggaacgtccacctacgatggtctgagcctggcgtgggcgtgcgaggaaaatctggcgaataagattaaggcattgacgttatttgctacccactatttcgagctgacccagttaccggagaaaatggaaggcgtcgctaacgtgcatctcgatgcactggagcacggcgacaccattgcctttatgcacagcgtgcaggatggcgcggcgagcaaaagctacggcctggcggttgcagctctggcaggcgtgccaaaagaggttattaagcgcgcacggcaaaagctgcgtgagctggaaagcattagcccgaacgccgccgctacgcaagtggatggtacgcaaatgtctttgctgagtgtaccagaagaaactagccctgcggtcgaagctctggaaaatcttgatccggatagtctcaccccgcgtcaggcgctggagtggatttatcgcttgaagagcctggtgtaataacaattcccgatagtcttttgctatcgggaatattaacgacaactgacgaataaaataaaaacaccctgtataataggaaagcttattttacagggtaaaaccatgccatctacacgctatcaaaaaatcaatgcccatcactatcgccatatatgggtcgttggtgatattcatggtgaatatcagttattacaatcccgcttacatcaactctcttttttccccaaaatcgacttacttatttctgtcggcgataatattgatcgtggaccggagagtcttgacgtcctgcgcctgctaaaccaaccctggtttacgagcgttaaaggcaaccacgaagcgatggcgcttgaggcattcgaaactggcgatggcaatatgtggcttgccagcggtggtgactggtttttcgatttaaatgatagtgagcaacaagaggcaatagatctgttgctgaaattccatcaccttccacatattattgaaatcactaacgacaacataaaatatgccatcgcacatgcagattatccggggagtgaatatctctttggtaaagaaatagcggagagcgaattactctggcctgttgatcgtgtgcagaaaagccttaatggcgagttacaacaaataaacggcgctgattattttatatttggacatatgatgtttgataacattcagacgttcgctaaccagatttatattgataccggaagcccgaacagcgggcggctgagtttttataaaataaagtaatctcatgcttcttctgtgaagcatgagtaacccggtgttattgcaggccattattcatttttcgctaccagcaaagagagatcctgcttcaccagcgcgcgactggcactctccggcaaaccgtcgtctgtaataatctgatcaaactcgcttaatggtaacgccagccatgtcgccacctgaccatatttcgtcgcatcacagaccaaaactcgctggcggctggcactggcaatcgcccgtttcaccgtgactttatcttccgctggcgtagaaatcccccgcacactccaactgcttgcagaaataaaagcctgatcaatcatcaggctgcgcagcatggtcgcagcggcttccccgacacaggaacggttttcccgacacactgcaccgccagtgtgaataattgtgcaattactgttgtcgagcaagtagtccgcaataacgaaatcgtttgtgaccacagtcagactctccatgtgaatcagatgctgtgctatcgctaacgtggtcgttcccgcatccagatagatacaacttcccggctgaacaagacttgccgccagcttgccaatagccgctttttgcgtcattgccagcgcagtttttacctgatgagaaggttcatgcgccacgcgtcccggagactggacgcctccggacaccagcacaacggctccctgctgctccagtttttgtaaatcccgacgaatggtcatatgactcacattcattctgtccgttagttcagcaatactgacaatgcctttttcagctaccatctcaaggatgatttggcgacgctctacgggtatcaacttttgctccttcctttgtcctgcactcattctacgctatttgcctgcgaaacgtgcgcggcgcaactaacgcttagttcacataaaataacacacaatgttaatttatgtgaatcagatcaccataccgttatcttccagcgcttatattcacaatatcaaacaaaatatcacttaaattaacaaggagagcagatgaaaacgggatctgagtttcatgtcggtatcgttggcttagggagtatgggaatgggagcagcactgagttatgtccgcgcaggtctttctacctggggcgcagacctgaacagcaatgcctgcgctacgttgaaagaggcaggtgcttgcggggtttctgataacgccgcgacgtttgccgaaaaactggacgcactgctggtgctggtggtcaatgcggcccaggttaaacaggtgctgtttggtgaaacaggcgttgcacaacatctgaaacccggtacggcagtaatggtttcttccactatcgctagtgctgatgcgcaagaaattgctaccgctctggctggattcgatctggaaatgctggatgcgccagtttctggtggtgcagtaaaagccgctaacggtgaaatgactgtcatggcctccggtagcgatattgcctttgaacgactggcacccgtgctggaagccgttgccggaaaagtttatcgcataggtgcagaaccgggactaggtagcaccgtaaaaattattcaccagttgttagcgggcgtacatattgctgccggagccgaagcgatggcacttgcagcccgtgcggggatcccgctggatgtgatgtatgacgtcgtgaccaatgccgccggaaattcctggatgttcgaaaaccggatgcgtcatgtggtggatggcgattacaccccgcatagtgccgtcgatatttttgttaaggatcttggtctggttgccgatacagccaaagccctgcacttcccgctgccattggccagtacagcattgaatatgttcaccagcgccagtaacgcgggttacgggaaagaagacgatagcgcagttatcaagattttctctggcatcactctaccgggagcgaaaagttgagctaaactctaccgggagcgaaatcatgatcaagattggcgttatcgccgatgattttaccggcgcgacggatatcgccagttttctggtggaaaacggtctaccaacggtacaaattaacggtgttccaacaggtaaaatgccggaagcaatcgacgcactggtgatcagcctgaaaacgcgctcctgtccagtggttgaagccacacagcaaagcctggcggctctgagctggttgcaacagcaaggttgcaaacagatctatttcaaatactgctctactttcgacagtacggcgaaaggtaatattggcccggttaccgatgccttaatggatgctctcgacacgccgtttacggtcttctctccggccctgccggtcaacggacgtacggtttatcaggggtatttgttcgtaatgaatcaactgctggccgaatccgggatgcgccatcacccggtaaatcccatgaccgacagctatcttccccgtctggttgaagcgcaatccacagggcgctgcggcgtcgttagcgcacatgttttcgaacaaggtgtggatgccgttcgtcaagagctggctcgcttacagcaagagggctaccgctacgcggtgcttgatgcgctgaccgaacaccatctggaaattcagggagaagccttgcgcgatgccccactggtaacgggcggttctggtctggcgattggcctggcccggcagtgggcgcaagaaaacggtaaccaggctcgcaaagcagggcgtccgctcgctgggcgcggcgtagtgctctccggtagttgctctcaaatgaccaaccgccaggtagcacattaccgtcaaattgcaccagcccgtgaagttgatgtggcacgctgcctcagtattgaaactctggccgcttatgcacacgaactggcagagtgggttctgggccaggaaagtgtacttgctccactggtttttgccaccgccagcactgacgcattggcagcaattcaacagcaatacggtgcacaaaaagccagtcaggcagtagaaacactgttttctcaactagcggcgcggttagcagcggaaggcgtgacacgctttattgtcgcaggcggtgagacctccggcgtagtcacacagagcctgggaataaaagggtttcatattggcccaaccatttccccggcgtgccgtgggtaaacgcactggataagcctgtctcactcgcccttaaatctggcaacttcggtgatgacgcctttttttcacgagcccaaagagagtttttatcatgagcgatttcgcaaaagtagagcagtctttgcgagaggagatgacgcggattgccagtagtttctttcagcgcggctatgcaaccggtagcgctggcaatctgagcctgcttttacctgacgggaatttactggcgacaccgacaggtagttgcctgggcaatctcgatccgcagcggctttccaaagtcgccgcggatggcgaatggttaagtggtgacaaacccagcaaagaggtgctctttcatctggcgctgtatcgcaacaatccgcgctgtaaagcggtggtgcatttgcacagcacatggagcacggcgctttcctgcctgcaagggctggacagcagcaacgttattcgtccgttcacaccatacgtggtgatgcggatgggaaatgtcccgctggtgccttattaccgaccgggcgataaacgcatcgcacaggatctggcggaactggcagcagacaatcaggcttttttactggcaaatcatggcccagtggtttgcggtgaaagcctgcaagaagccgccaacaatatggaagagctggaggaaacggcaaagctgatttttattctcggtgaccgcccgatccgttatctgaccgcaggtgaaattgcggaattaaggagttaatgcaatgcctcgttttgcagctaatttatccatgatgttcaccgaagtgccttttattgaacgcttcgccgcagcgcgaaaagccgggttcgatgctgtggaatttctgtttccctataactactccaccctgcaaatccaaaagcaactggagcaaaaccatctgacactggcgctgttcaataccgctcccggagatattaatgcgggggaatggggattatccgcccttcccggacgtgagcacgaagcacacgcagacatcgacctggcactggaatatgcattggcgctcaattgtgaacaagtccatgtgatggcaggcgtcgtgcccgctggcgaagatgctgaacggtaccgggcagtatttatcgataatatccgctacgctgccgaccgctttgcgccacacggcaagcgaatattagttgaagcactcagccccggcgttaagcctcattatctcttctccagccagtatcaggcactggctattgttgaagaggttgcgcgagataacgtgtttattcaactagatacttttcatgcgcaaaaagtagatggcaacctgacgcatttaatccgcgactacgccgggaaatatgcgcacgtacaaattgccggactacctgatcgacatgaaccggacgatggagaaatcaactatccgtggctgttccgcctgttcgatgaggtgggatatcagggctggatcggttgtgaatataaacctcgtggcctcaccgaagaagggcttggctggtttgacgcctggcgctaattcgttaaatccctaattacaacgtacccatacatccccccatctacggatggggtaggttaactataactttcagacagggtttcccatgtccacaattacattgttatgcattgcgttagctggcgtaatcatgctgttgctgctggtcatcaaggcaaaggtacaaccattcgttgctttgctcctcgtcagcctgttagtcgcacttgcggcaggtataccggcgggcgaagtgggtaaagtgatgatcgccgggatgggcggtgtgcttggttccgtcactattattattggtctgggcgctatgctggggcgtatgatcgaacactctggtggtgcagagagtctggctaattatttcagtcgcaagttaggtgacaaacgaactatcgctgcgctgactctggcagcgttcttcctcggtattcccgtcttctttgatgtcggctttattattcttgcgccaatcatttacggttttgccaaggttgccaaaataagcccactcaaatttggcctgcctgtcgctgggatcatgctcactgttcacgtggcggtaccgccgcatccaggccctgtcgccgcagcggggttactccacgcagacatcggctggctaaccatcatcggtattgcgatttctattcccgtaggggttgttggctactttgcagcgaaaataatcaataagcgccaatatgcgatgagtgtagaagtactggaacagatgcaactggctccggccagtgaggaaggcgcgacaaaattaagcgataaaataaatccaccgggcgtcgcgctggtcaccagcctaattgttattcctatcgcgattatcatggcgggtacggtttccgcaacactgatgccgcctagccatcccctgcttggtacgctacagctgatcggcagtccaatggtagctctaatgattgcgctggtgctggcattctggttattggctttacgtcgcggctggagcttacaacacaccagcgacattatgggcagtgcgcttcctactgcggcggtagtgattttggttactggtgctggaggggtatttggcaaagtgctggtggaaagcggcgtcggcaaagcccttgccaacatgctacaaatgattgacctgcctctgttaccagccgcatttattattagtctggcgctgcgtgcaagccaggggagtgcaaccgtagcaatactgacaaccggcgggttactcagtgaagcggtgatgggattgaatccgattcagtgcgtattggtgacgctggcagcctgctttggtgggcttggtgcgagtcatattaatgacagtgggttctggattgtgaccaaatatctggggttgagcgtagcagacggtctgaaaacctggacagtgttaacgaccattctcggttttaccggactcttaattacctggtgcgtatgggcggtaatttgaccttaataaaaaggtccgatgggcatcggaccttttattgtgcacagaaaaggccagcctcgcttgagactggcctttctgacagatgcttacttactcgcggaacagcgcttcgatattcagcccctgcgtttgcaggatttcgcgcaaacggcgcaggccttcaacctgaatctggcgaacacgttcacgggtgaggccaatttcacgacctacatcttccagtgttgccgcttcgtaccccagcaaaccgaatcgacgtgccagcacttcacgctgtttggcgttcagctcgaacagccatttgacgatgctctgcttcatatcgtcatcttgcgtggtatcttccggaccgttctctttttcatcggccaggatgtccagcaacgctttttcggaatcaccacccagcggggtgtctacgctggtaatgcgctcgttaagacgaagcatacggctgacgtcatcaactggcttatccagttgctctgcgatctcttccgcacttgattcatggtccagcttatgggacaactcacgtgcggttcgcaggtaaacgttcagctcctttacgatgtgaatcggcaaacgaatagtacgggtttggttcataatcgcccgttcaatcgtctggcgaatccaccaggttgcgtatgtactgaagcggaaaccacgttccgggtcaaacttctctaccgcgcggatcagccccaggttgccctcttcgataaggtccagcaacgccagaccacgattgccataacggcgggcaatttttaccaccagacgcaagttactctcgatcatccggcggcgagaggcgacatctccacgcagtgcgcgacgcgcaaaataaacttcttcttcggccgttaacagtggactataaccaatctcaccaaggtaaagctgagtcgcgtccaacacacgctgtgtggctccctggcttaacagttcctcttcggccaaatcgttatcactgggttcctgttctactaaggccttttcgtcaaaaacctcaactccgttctcatcaaattccgcatcttcatttaaatcatgaactttcagcgtattctgactcataaggtggctcctacccgtgatcccttgacggaacattcaagcaaaagcctggttccgccgatttatcgctgcggcaaataacgcagcgggtttacggatttccccttgtaacgaatttcaaaatgcaagcgtgtactactggttccggtgctacccatggtcgctattttttgccccgccttaacttcttgttgttcccggaccagcattgtgtcgttatgggcgtaggcactcaggtaatcatcattatgtttgatgataatcagattaccgtagccgcgcagcgcgttaccagcataaacaacgcggccatctgcggtcgcgataattgcctgtcctttgctgcctgcgatatcaatccccttgttgcccccctcagaagcgccaaaggtttcgatcactttgccctcagtcggccagcgccaggtggagataggcgtactggtacttgtactgctgacagtcggctcggttgtgcttgctgttggtaccgttacaggcgctgtgaccgtggtcgcagttggcttgttgttcggcaacattttgttagcactctgttcaccgctagactcagaatacgtaattgtcggttggctcgcaacagcaacggtggaattttgtgcaggcttgatcacaactccttgctctgctgcgtcggcctgggtaatggcatttccgccagtgattggcgtaccggaagcattacccacctgcaaggtctgaccaacgttcagcgcgtatggtgcctgaatattgttgcgctgagcaaggtcacggaaatcgttgccagtaatccaggcgatatagaaaagtgtgtcgccttttttcacggtataggtactgccgctataactgcctttcggaatgttcccatactgacggttatagacgatgcgtccgttttccatctgtaccggctgctgagctactggctgcactggctggatttgcggttgttgagtagcctgaatttgtggctgctgcaccggctgaatttgcggttgctgcgctgtagacgtcgtccccattttcggcggcggcgtaatcaacataccagaattagtatttgcaggcgcattgccattaacggagctgaccggtgccggtggattactagtgtcagaacagcctgccagccataggctaaccagactcaaagccgcaatgcggcgaacggtgaattttgggcttcccgcgctcatttatcccccaggaaaaattggttaataaccagtgacataattaccgtgcaaggcaccctactgaacactggaaaagatgttcacgatacgctgacctgcggcaaaataaccaggaaaaatccaggtatttcctcacgttttaagccagctcacccttcactaaagggacaaagcgcacggcctccacggtatcgataataaattcgcctccccgacgacgcacccgtttcaaatactggtgctcctcccctacgggtaagacgagaatcccgccttcgtccagctgcgtcattagcgcagttggaatttccggcggtgccgccgtaacaatgatagcgtcaaacggcgcacgtgcctgccaaccttgccatccatcgccatgacgggtactaacattatgtaaatcaagatttttcaggcggcgacgtgcctgccactgcaagcctttaatccgttcaacgctgcaaacatgctggacaagatgcgccaggattgccgtttgatatccgctaccggtgccaatttccagcacccggctctgcggcgtcagctcgagtaattcggtcattcgcgccaccatatatggctggctaattgtctgcccctgacctatcggcaaagcgatattgtcccaggctttttgttcaaacgcttcatcaacgaatttttcacgcggcacggcggcaagtgcattcagcacctgctcatcctgaataccttgcgcacgtaattgatccagaagtgcttgtacgcgtctgcttaccattgcgtgccaactcccacgctgtttaaccagtcactaaccacatcttgcgcgctatgcgcagttaaatccacatgcagcggcgtgatggagacatagccctcatctaccgcagcaaaatcggtccccggaccagcatcacatttaccgcccggcgggccaatccagtacagcgtattgccgcgcggatcttgctgcgggatcacctgatctgccggatgtcgtgtaccgcagcgcgtcacgcgaatacctttgatttgatccaagggtaaatccggaacgttaatattaagaatacgcccggtgcgcagcggctctttacacagtgcgcgcaaaatactacaggttaccgccgcggcagtgtcgtaatgtttatgcccgtcaaggctgacggcaagcgccggaaaacctaaatgacggccttccatcgcggcggctaccgtaccggaataaataacatcatcccccagattcggcccggcgttaattccggacacaacaatgtccgggcgcggacgcatcagagcattcacgccaagatagacgcaatcggtcggggttcccatttgcacagcaatatcaccattttcaaaggtaaacgtgcgcagggaggattccagtgtcagagaattactagcgccgctgcggttacgatcgggggcgaccacctgaacgtcagcaaactcacgcaaggctttcgccagcgtttgtataccgggtgcatgtaccccgtcatcattactcagcaatatgcgcataatcacctgttgtgttgataagttccctgacaacgctggttgcaaaactacccgccggaagccagaaacggatctctacggtgacgtcatcccaccaattccagcttaattgttgcggatacagcagcatcgctctgcgcgcggcttcaactttttcgcgcaccagtaaagcttgtaattcagtttctgcggcgacagctgcttgttcgaatgccagcgcttcacgctgagttccccattcgccactgcctggcaatgcggcggttatcatcaactctttatcgttgacgcgacgctgtaattccgccagttcttcggtggttgcgacaaaccagctaccacgtccggctaattgtagcgcatcgccgtcaacaacttgattaacgtctgcttttttgaggcgctcagcaacaatctgattaaacaacgcactgcgggctgcgctcaaccaaaaactccgtttattgcgatcgcgcaccggagtattggtttgcgcccagcgctgcgccccctgcaagttgctaccgccaatcccaaaacgttgggcaccgaagtagttcggtacaccttttacgcaaatatcgatcagacgttgttcaacgtcatcgcgattgctcacttcgcgcagaaccagggtaaaggcgttacctttcagcgcgcctaaacgcagcttgcgcttgtgccgcgcatactccagcacctggcagccttccagttgaaaggcgctcagatcgggcatttccttgcccggcacgcgagcgcataaccactgttccgtaacagcatgtttgtctttttgcccagcgaagctgacttcacgggcatgaattttcaggaatttcgccagtgcatccgccacaaaacgggtattgcagccgtttttgaggattctaaccagaatatgctcaccttcaccatcaggctcaaagcccaaatcttccaccaccacaaagtcttccggattggctttcagcagcccggtgccttgcggtttaccgtggaggtaagtgagattatcaaactcaatcattttgttgccttaatgagtagcgccaccgcttcacaggcaatcccttccccacgtccggtaaatcccagtttttccgtagtagtggctttcacgttaacatcatccatatggcagccgagatcttcggcaataaacacgcgcatttgtggaatgtgcggcaacatcttcggtgcctgagcgatgatagtgacatcgacgttgccaagggtataacccttcgcctgaatacgacgccaggcttcgcgtagcagctcgcggctatcggcacctttaaatgccggatcggtatccgggaacagcttgccgatatcccccagcgccgccgcgccaagcaatgcatcggtcaacgcatggagcgccacgtcgccatcagaatgcgccagcaatcctttttcgtaaggaatgcgtacgccaccaatgataattgggccttcaccgccaaaggcatgtacgtcaaaaccgtgtccaattcgcattatgtattctcctgatggatggttcgggtgaggtaaaactcggccagtgccaaatcttccgggcgcgtgactttaatgttatccgcacggccttcgaccaactgaggatggaatccgcaatattccagcgcgctggcttcgtcggtaatagtcgcgccttcatttagagcgcgcgtcagacagtcatgtaacagctcacgagggaaaaattgcggcgtcagcgcgtgccataagccgttgcgatcaacggtatgagcaatggcatttttgcccggttcggcacgtttcatagtatcgcgcactggtgcggcgaggatcccccccgtgcggctggtttcgctcaacgccaacaatcgcgcgaggtcatcctgatgcaaacaaggacgagcggcgtcatgcaccaatacccactgcgcgtcgccagcggctttcagacctgccagcacggaatcggcacgctcatcaccgccatctacaacggtgatttgcggatgattcgccagaggaagttgtgcaaaacggctatcgccaggacttatggcaatgacgacacgtttcacccggggatgcgccagcagcgcatgcacgctgtgttcaagaatggtttgattaccgatactgagatattgcttaggacattccgtttgcattcgacggccaaatccggccgccggaaccacggcgcaaacatccaaatgagtggttgccatgttaattcccgggctgatttatcgattgttttgccccgcagactgtgcgcgcttgctcgcgtcaggcaccagacgataaaaagtttcgcccggcctggtcatgctgagttcattacgcgcacgctcttcgagcgcctcctggccgccattgagatcgtcaatttcggcaaaaagttgatcgtttcgcgctttaagtttcgcgtttgtagcttgctgtgccgccacatcatcattgacgcgggtatagtcatgtataccgttcttaccgaaccacaggctatactgtagccagaccagaatagccagcaacagcagcgttagtttacccatcctgccccctgaaaaacggcatcatcatcccatgcatccgaagacgactctacatcctctgttggggataccgcgacaacgcgggcaaatgtaccacatttgtccattgttacgtatacccagggcgtgcagaacataatctcattattagttacggtttgaattatgaacagaggagacgggaaagtacaaattagcccagtagccacataaacagtgcgccaaacataatgcctactgtcaccagggtgaaaacaatactgtagcgtagctttccgtccatcaaactatgcagcgcaatccccaccactaccgcgacgggcatcagcgccagaaagaaaggccaggtgtagataaagaagaacagcgtgttagagccataaatcaacatcggcatcgccagcgcaaataaccaggagataaaaccgaccacggcaccaggcagactccatgtggtttcttcatcctcagtaaggctgtcgttatttgttagtgtaatgttatggctattacgcatatttgatcctgttactttgacgaaccgggcatggaaacccggtggtgtctcaggatctgataatatcgttctgtctcaacagatctaataattgctgtaccaaatttgttactaattgttcaccattgagatgaatttctgcgctttcaggcgcttcgtaaacggaatctattcccgtaaagttgcgcagttcaccggcacgcgctttcttatataagcctttgggatcgcgggcttcgcaaatcgccagcggcgtatcgacaaacacttcgataaagcgcccttctcctacgcgttcgcgaaccatctggcgttcggcgcggtgtgggctgataaatgcggtcagcaccaccagtccggcttcaaccatcaaattcgccacttcaccgacgcgacggatattctctttacgatcggcatcgctaaaaccgagatcgctgcataatccgtggcgaacattgtcgccatccagcagatacgtactgacgccgagtttatgtaacgcctcctccagcgccccggcgaccgtacttttaccggacccggagaggccggtaaaccacagcactacaccacgatgaccgtggtgtagctcgcgttgttgcacagtgaccggatggctatgccagacgacgttttcgtcatgcagcgccattatttatcccccagcaaatcgcgcgcgccccagtgcggaaagtggcgacgaaccagagcattcaattccagttcgaatgcactgaattcagatggcgcagcagttgcctggctaactggctcgtgcaccataccggcacccacggtcacattgctcaggcgatcgataaaaatcagcccacccgtcaccggattttgttgataacgatctaacaccagcggctcgtcaaaagtgagatccacgaggccgatcccattcagtggcaggttttcaacttcacgctgggtaaggttattaatatcaacctgatagcgaatgccatcaacacgcgcgcgcgtcttcttaccggcaattttgatgtcgtaactctgccctggagaaagcggctgttccgccatccataccacatccacgctcgcgctctgcaccgccggtaacgcttcgtctgccgccagcagcagatcgccacggctgatgtcgatctcatccgtcagcaccagggtgatcgcttctccggcaaaggcttcttcgcgatcaccatcaaaagtcacgatccgcgcgacgttactttccacaccagagggcagcactttgacacgttgcccgacttccacgcgaccggatgccagcgttccggcgtaaccacgaaaatcgagattcgggcgattaacgtactgcaccgggaagcgcattggctgagcatccaccactcgctggatctccacggtttccagcacttcgagcagtgtcggaccgctgtaccacggcatactttcactttggcttgccacgttgtcgccttccagtgcagagagcggcacaaagcggatatccagattacccggcagctgcccggcaaaggtcaaataatcttcacgaatacgggtgaacgtctcttcactgtaatccaccagatccattttgttgatcgccacgaccagatgtttgatccccaacagtgtggagataaaactgtgacgacgggtttgatcgagcacgcctttacgggcatcgatcagtaagatcgccagttcacatgtgcttgcgccagtcgccatattgcgggtgtactgctcgtgccctggggtgtcggcgataataaatttacgcttctcggtagagaaatagcggtaggccacgtcaatggtgatgccctgttcgcgctcagcttgcaggccgtccaccagcagagccagatccagcttttcgccctgggtgccgtgacgcttactgtcgttatgcaggctactgagctgatcttcgtagatttggcgggtatcgtgcagcagacgaccaatcagagtacttttgccgtcatcgacgctaccacaggtcagaaaacgcagcaggcttttatgttgttgcgcaatcatccaggcttcgacgccgccttcattggcgatttgttgtgcaagtgcggtgttcatcttaaaaatacccctgacgttttttcagctccatagaccccgcctggtcgcggtcaatcacgcggccctgacgttcactggtggtggaaaccagcatctcttcgatgatttccggcagtgtttgtgcattactctccaccgcaccggtcagcggccagcagcccagcgtacggaaacgcaccatccgttttttaatcacttcgcccggttgcaggtcgatacggttgtcatcaatcatcatcaacataccgtcgcgttccagaaccggacgttccgcagcgagatatagcggaacaatgtcgatattttccagccagatgtattgccagatatcctgctcggtccagttagagagcgggaagacgcggatgctttcgcctttgttaatttgcccgttgtagttgtgccacagctccgggcgctgatttttcggatcccagcgatggaagcggtcacggaaagagtaaattcgctctttagcgcgggatttctcttcgtcacggcgcgcaccaccgaaggcggcatcaaaaccgtatttgttcagcgcctgtttcaggccttcagttttcataatatcggtatgtttcgcgctgccgtgcacgaatggattaatccccatcgccacgccttccgggtttttatgcaccagcagttcgcagccgtaggctttagcagtacgatcgcggaactcatacatctcgcggaatttccagccggtatcgacatgcagcaacgggaaaggcagcgtacctggataaaacgccttgcgcgccagatgcagcatgacgctggaatctttaccgatagagtagagcatcaccggattactgaattctgccgccacctcgcgaataatgtggatgctttccgcctccagttgccgcaggtgagtaagtcgtatttgatccataaccgttcctttgcaataccgctattttcttgccatcagatgtttcgactatagggagcgtaagagaacgaatgaaattaccaattagaatgagtagttccttaacggaataacgatttggcaaagctaatatcaaaaagtgcttaaggcaccggatttcgggcgtttaggaagatttgaaattgttttagcgcagcggcagtttcatactatggcggtaaaaaaatttgcatggtatttaaggactcactatgttttccgcattgcgccaccgtaccgctgccctggcgctcggcgtatgctttattctccccgtacacgccagcagtcctaaacctggcgattttgctaatactcaggcacgacatattgctactttctttccgggacgcatgaccggaactcctgcagaaatgttatctgccgattatattcgccaacagtttcagcaaatgggttatcgcagtgatattcggacatttaatagtcggtatatttataccgcccgcgataatcgtaagagctggcataacgtgacgggaagtacggtgattgccgctcatgaaggcaaagcgccgcagcagatcatcattatggcgcatctggatacttacgccccgctgagcgatgctgacgccgatgccaatctcggcgggctgacgttacaaggaatggatgataacgccgcaggtttaggtgtcatgctggaattggcagaacgcctgaaaaatacgcctaccgagtatggtattcgatttgtggcgaccagcggcgaagaggaagggaaattaggcgctgagaatttactcaagcggatgagtgacaccgaaaagaaaaatacgctgctggtgattaatctcgataacttaattgttggcgataaattgtatttcaacagcggtgtaaaaacccctgaggcagtaaggaaattaacgcgcgacagggcgctggcaattgcgcgcagtcacggaatagccgcaacgaccaatccgggtttgaataaaaattatccgaaaggcactgggtgttgtaatgacgcagaaatattcgacaaagcgggcattgctgtacttagcgtggaagcgactaactggaatcttgggaataaggatggttatcagcaacgcgcaaaaacacctgccttcccggcgggaaatagctggcatgacgtaagactggataatcaccaacatattgataaggctcttcctggaagaatagaacgtcgctgccgtgacgttatgcggataatgctacctctggtgaaggagttggcgaaggcgtcttgatgggtttgaaaatgggagctgggagttctaccgcagaggcgggggaactccaagtgatatccatcatcgcatccagtgcgcccggtttatccccgctgatgcggggaacaccagcgtcaggcgtgaaatctcaccgtcgttgccggtttatccctgctggcgcggggaactctcggttcaggcgttgcaaacctggctaccgggcggtttatccccgctaacgcggggaactcgtagtccatcattccacctatgtctgaactcccggtttatccccgctggcgcggggaactcccgggggataatgtttacggtcatgcgccccccggtttatccccgctggcgcggggaactctgcgtgagcgtatcgccgcgcgtctgcgaaagcggtttatccccgctggcgcggggaactctctaaaagtatacatttgttcttaaagcattttttcccataaaaacaacccaccaaccttaatgtaacatttccttattattaaagatcagctaattctttgttttcaaacaggtaaaaaagacaccaaccttaaaccatccaaatctaccggggtacgcctgtttaacccaaatgtctggaactcaaatcccgtttccgtattcgttgcccatgccatcactacattgccttcttccgccagtccagctatttgttcccagatcatttcacgaatttttgcggatacatcacctacatatacccctgcacgtacctccaacaaccagatggctaatctgcctcgtaagcgcggaggtacattttcagtgaccacgaccaacatactcatttcagctactccgatggcctgcatctcccagactaacaggaagcggaatggcaacaggctgtgcatcttcaggtggggccggcggttgtatttctccagcggcaagcacgtcctctataagcggaatcaatttggctaatgttttactactgcgaaaaatatccctgcacgccaaacggacttcccggtccggctcaccagggttacgacgcgctatctcaaaagctttcggtacaacagtgtcaaatttaatgatgtctgcaatatcgtaaacaaaggaaagaggctttcctgtatgcacaaacccaatagctggtgcataaccagctgcaagtatcgccgcttcagttacgccgtataaacaggaagttgcagcgctaatgcattggttgatcgtatcgcccttttcccagtctttcggatcgtagcgacgtccattccatgtcacgccgtattgcttcgccagaagtgcgtaggttgcccgcacgcgactgccttctatacctctgagttgctctacggagcgccgggcaggcgcaggttctccaaaccgaagttcaaacattttacgtacgaccttcagacgcaaatcttcatccagagcaagttttgcctgatagagcagcttatcactacgcgcacctccaggctgaccagaagcataaacacgaacgcccgcttcccccacccataccaacaatgttccaacttgcgcagccaggcgtacagctgcatggctaacccgtgtaccaggttccagcatgatgcaggcaacgctgccaacaggaatatgagtgcggatccctgtcttgtcgataagtacaaacgcgccatctattacatcgatctgcccatattgcagaaagatcatggagacgcgatctttgagtggaatgggattaaggggaagccaggtcattttattacacctcaatcacagtggagccaaagatagcaagccacatcccatgcttttagctggcccaataccttgctgtacaagatctattaacgctggcgcgtcgttgatggtgagcacaccttcaaagcaaaccgtttggatctttccacttttaccatcaccagaaaaatactgtggccgttcgcttatgggatgcacatcttcaacgcgcgccgcattgcccaatttacgttgcaaccacgcgatttgttctgcttcttttattaacggaacccgacagcgtttaatattccctttactgtccaggcgcttttgattgtcgagaatagttttgatcggatttgcccgaagccgaaaatagagtggaacaccaacctgaagttgaaattcaacctgtttagttttaatgactgtcgcaacggcagtactaacaggcatttgcgcactctgcaataaaacatgacagccttctggtgtgtttcgcttctcaacatgaaaaagaaaatcacgagcagcatccggtctgtttggaaataaatgccataatccctggtgaagttggtaaagatccctgctccaggccctggcaatgatgactttactgagatacatccatacctcctttaatcacataccattctcgggaagcaaattgtcgaggcaaggtgatcatcggttcgtcgcgcgccgtaaattttaaatgatgccctgtaacactttcctcactatatatatcgccgccaacgggctcataatttaatagcgccttctgaggatcgcttgcctgacatgtccccaaaaaaagcgggtgtgttagtgggcaacttctccgccccaggtaaggtgtataccgaggctttaatactgctttttcaagttcactgataaccatcgttgcatggggtgttaaccagagagcgacggtaaaggaggcatcacataaatattcgcgccatgtttgaatcgtttcatgacttttcaaaccacggtaatcttctcgcgctccaaggactgtatggtaatcacgcaaccccgttacagacacacgacgatcgtcaagaatgagttcatcgcagcgcactgcaaattgcacactctcacttaacgcctgtaaactagaagtatcatcacgttggatcccaagacaagccccgagtagccctaataacccgcttcgggtcggaaatcttccggtaggtcgcgttccttcaaaggtcggctgcccccaggcttgcattggcccagcaagccgcaagatcaaataagatctcatgttcacgcctcgccattattacgaacccaggattttaactgttctaaagtaggcatttgtttaacttgagcagtaattgggtctacatcagataagctgaattgcgcagcagctccgttcagaccatatccattggcaacgcgatcccaatattgattaaacgcctgtatagacggttgcaaaaagccatctttcgctttaaccgctttttcaaaagcatttgccatagaaagtggcatatcggagaaattaaccattaccatatccgcagggttaaaagcggcataagtacgctgttttgctccagggacctctgttgccagcatatgaacaacatgggttgcaatttccagagcctgctccctggaggcaccacctaaattttcctgaagttgagcgaggttaatgttggcataacgataaaaaacaccgctactaaattcctgagttcccagatgtgcagaaccttgttcctgtaaatcatctacagcggtgaaccagtcaatatcagaatcaacctgatgagtagtgatcgcatgcgcaatggacattgcaccatcaacttttcccaactcagtcatcatgccgctggttgccattcttccactaagcgcaatatcaacaccctgctgtaaattcacacgtatggcggcaatatcttccttaagaactttgagcagctttttatcatccagattatcagcctctgcttttgcaacctgctcacagaaccaggctatttctcccacaacccagggagtaaccgcatcggcagaaatcttttcggcttcatcaacacttttaccggagagcagcgctaatgtcttatcgatgattttttggtcaaaacgttcaccaagtttttgccgaagaacatcacgtaattgtgcaagatgaatggttctgagactggattcaccaatattttgtgcgtaataaccacttttacgcatcgcacgtttaaggctttgactactaattcttactcgtcttttgccgccgaaaatagcgtctttctgcatgttcatatcgtcgcggttcagacaactagggctgtgagagatcagaacatgaatattgataaagttagacatagaaaggtttccttacgcatttttgtttgtggtcaatacaaaatcttccagaagttgctggcgttcgcgctttccccaccaggtcaacatcctggccattaatggccagtcaagtacgggttcggcgtgagtaagtaatcgacgtaactggaccatatcggctgttctgtcagcccgaattaattgaaagatacggcgctcgttaattcttccactattggctaaagctcttcccaagctgatacctgttgtttgctcgctttttttgtcctgatgtcggatgacattctttcctgcgctcaggcaaaacaccatgcgcaaaagagcctgctggtgacgtgggttttcccaaccaaaaggttgcaccagcctataaaacgcagggatatcgcgtaattcatcaggttcactaacacgtctaatttgcgcacaacttccattatccagttgttgccaggctcgatataaagccattgcatcaatttcatcagccattacttggccctccttgcggttttaactcccgtaaatgtttgtatagcgtggcgcgggcaagcgctaatgtgcttattaatttaggatgatgtgcatagggagctacagattgattaaatagcatttcacacaattgatgaagtttgtctcgtaaatcagctattacctcatcagcctgggaaaaattaacattcgccagtacatcgggaattaataattcactctgtcgatagaaatgcctttctgcagtctcatgaacagagactccggcccctttgaagtctttatttttaaacccttctgcaaaggtatataacgccttgcgtaaggctgttttatatcccaaaccaacagtcactatttcgtttatcacattgccgtattgttgccacccctgattaaacatcaacacatcatgacgccgttcaagaatagatgcttgattattacgatatccccccataatcaattcaagaggactttgcggcgcaatatttctgaattgattcacaaccgccgccacgcgatttccattttcattttgaataatcttatctaccacaactcggctgatttgtgtccaacttggtgcggaggtggtgaaagcaagaaatttttcctcaacctcccctttcttgactgttaccagacaaggggaatgcggatggggccatagcccattaactgtaaaggtaaatttttccttaagaaaaccggtataacgcaaattgctttcctgtccacagcaagaacatttaccaatcccaatgggatcgcataattcaatatgcgctggttgccagaatagaccacggacaaacccaatactgctagcaggtatagactcattggacttgataggtttaatccaggtaggttggttttccgtatgactttcattaggaaattgtttttgaagacgaggtaatgtgaggacattgagtaacaccgtactacgaagatcgatcccacgtacgaacgttgttacaggtgttcctccacgtaaaccgcttttaaaaccaccaccaaaacctggtgcctgattcgcctggttgaataacgcaatcgcagtgcatccaccacataatgcttcaccctgccccggttgattgacaaatgcacaattcgtcgcgccgcttaccccagccaacagtttttccattggagtcacatcatttgctttgacacctttggtctgcataaagggatgttctgcgtgattaaggtagaacatatctatccacggcgcgatgagttgttgaaactcatcttcagtgagcggattcattatgcgatgtcgaaattcaacgtcatcttttgccggggcgataatttgcccaatgcaaaccagcagtgctaaagcggccagttccatatcgtcacggggcaaacttaatcgccactgatctctactgcagtataggctttgcagatttatgatttggactttccccccgtttcgcgggcgtacagggatccagttatcaataagcaaattcatttgttctccttcatatgctccgacatttctcctgcatttctatacgtcggcacacttccgttatcggtaaaaacaaagaaaaaatacggcgtaattaattcaataatcacattcactgcaaaaatatattcattggtttaatacaattaacctatacatatattaagatgtgttgaattgtttaaagacaataatgcatgcatttcaaatctgcaagttattcgttttattattaaagaaacttttagttataataattaccatgaattttattacataaaatattcatactgtgaatataaaatctcataccgggaaattaaaagaagatgtacattgtgcaccttccctacttaagtagggataaaccgttattggtcttattatcgtcattgataacaatcattcccgaagttatttgggatttgcagggatgactctggtcatcccttcatcccctgtataggtaataacaatactgttaccctgccagacccatccatccagattctgtttcccttccagccaaagtaacccatcttcatctactacttcagaaaaactacgtttccaggtgaagggtacattgacgcgattaagtgcaagcgcctcatactgctgttcatgacttaggtcctcgtagacctggccatcgagcagttgtttaccactagacgtttgtacataaggcaataatggcaggctcatttccccatccctcgttaccgcaagaatggtttcatcgttatcctgcaagctatattcttcagcccactgcaggaccttgcgagccttgaaccttttttcacactcggcgctttcaaatttatccatgccattgccgacccattctggctcatccatttccgcatcatcgtaaatgctatccagccattgccggtaagcatcagggaaaaataaggatgctccattaagctcctcaatatgttgctgcgtccgccacatgactctaacgttgctataaatatgctcatgtcgtccgtaaccctcgccatcaggcagcaaaatggtggcaacaggaatctcaaaaccagcgggacgatatttgcgatgatggcgatgtaaacggcccaatcgttggaaaagcaaatctgcaggacaatgctgagtaattaaccaatcaaaatcaacgtcgagactttgttccacgacctgggttgcgacaagtatccgtccaacatttcgcttcccatttttgccgaaattgctaataactcgattctctttttcacgacgatcgttcagcgtaaagcgcgcatgaaacaaatctatatctacttgcgtgttatttagctcctttagccgttggtagcatacttgtgcaacgtcaaccaaattgcaaataagacagacctgtgcacccgcgtttgccgctgcgatcattcgctctaacatcgtaaggtcaggtaacatgtcagctaaacaaataggttctggctgaatgctaaagcggggcgggagttgttctggatgagctagcagatcaaaacgttgcgcaccattcacacctcgccagttaatgagtggatatgcggagttattttccactggatctgtatgcagaccataagtatccagaagtttctgtttttgtttcattggtagggttgcggaaagaagaataacactccctcccacatcagcctgagccttgagcactgcctccagcaagccgttcatataggtgtcgtaagcatgaacttcatcaacaattaaaacacttcgaccaattcccaaaccacggataaagcggtgtttaactggcaatacgcttatcaacacctgatcaatcgtgcaaacgccgatttgcccaagaaacactttcttattgctttgactcaaccactgacaacactgaacccacgcttcttcttgcccctgttcagtaatcgcgcgactttttatactttgaaagaggtggttaaaccgactattgccatgagcaagaataagatttggggaactaaataagtggctcgcgctcgcttccattctcgtaagcatagcattcgcggtagcttgtgttgggagggcaaaaataacactatccgcaatttgttgatcaataagtttccaagcataggccagcgctgtttccgttttaccggagcctgtaggtgcctctattaccgtcagcccgggagctactggaagagcatcaactaacacctgtaattgtctgggttgatagccattgtccagtagtgcatgaacaccttcataacatcgcttattacttacaagtccactcaactccaatacccggctcgcatcctgctgtcggtcctggaaatacgttctcagagcatttatgtcggaaggcgcatcctcattaaacagaaaggtattcgttgtagtccaggagcctaaccagtcagcaaggctgcaaaaacctgctaacagactactacaatcaggtggtatatcgtttatagataaccccgctggcgttaaaaataatgcttccagtacagatatccactcctcacgagcctgtttatcttgcgcagcataagatgccagagaagctggcatttcccaacggctcttatcttgatcctgggaatgtaatataaaaccatgatgtcctgtaacggcctctacccatggaaaccaggactcataaggatgaggagcggcatcaaaaaaactgaaaaaatccccgagagattgctcactaagactatcctggttaaaccaatacagaccggctgcaccatgattaaatttacggcacatttgtgtacttggaccattaagacttggcgttgcaggatttaatttcagccaactttctgcacttttatattggaatcgtatatcaaactttccaatatcatgaagagcaatgaaaaataacagccaggccttcaccctctgtttacttagcatttcatttcggcaaaaagtattttgcagtacgacactttgatcccaccagcaatctgcaacagcagcaacatcaaggcaatgataaattaacagatgaatatcatttcctttcgtcaagcttttactggattttccccagtaatggcatatatatttaaaaggttccattaatagcctccctgtttttttagtattatcgatgatatcagcgggctatttttcgatgctgctcataaatatcgaattacagtgatatacacatgtcttgcctccctgcaaagaagagactaacattcgaattgtttgggttcgaacgctggcctcaggttgatagaaatatcgcctggggcttttgtccatctggaacctcgcgaatgcttaacgccagacagcctcaagcacccgacgccattctatacctgataattcttcccgcggcgttcacgtttaaaatcaggaatgctgctcgcaaaataaaaacgcccccatcatttctgacagaggcgtttaatttgtccggcaatatttacccttcgtgtaacccacattccctttttaagccaaagaaacgcgtttcttcttccgccatgccgggttcccatttacgggttgtatgggtatcgcccacgcttaaatatccttcatcccataatgggtgatatttcaggccatgtttttgcaggtactgataaatagttcggttatcccagtcgataatcggcagcactttaaatacgccacgctgaattgccagcaccggtaaattggcacgactgccggattgttcacggcgcaggccagcaaaccaggtttgcgcattcagttctttcagagcccggttcatcggttcgactttgttgatgtcattgtacttttcaatgccttcaacgccctgctcccacagttttccgtagcgtgcttcctgccaggctgcgctttcggtagcacggtacactttcaggttgagcttgagtttgtccgttaactcgtcaataaagcggtaggtttccgggaacaagtaacccgtatcggtgaggatcaccggaatatccgggcgaatttgattcaccagatgcaggctcaccgccgcctgaatgccaaagctggaagaaagtacatattcaccgggcagattatccagcgcccaggctacgcggccttcagcgtccagtttttccagttcggcgttagtttccgccagcgccagaatgcgatctaccttcggcagttcgttcagggcgtttagatcgagtttggacatagattcctcactgtttgccttgcctgatgcgacgctcacgcgttcttatcaggcctacaagaccgggctgatggttaatcccacaaatcacgcgccggatcgagcaccgggcgaatgatgcccgcacgcaccgtaaagtcgccgaagccttcacccgcttcgcgctctttcgcccagcgccctatcagttcatcaaggctcgccaggatttccggctcggtgatgttttctttatacatccgtgggatacgtgtcccaatgcggttgccgccaagatgcaggttgtagcgacccggcgctttacccaccaggcccacttccgccagcatcgcgcgaccacaaccgttcgggcagcctgttacacgcatcacgatatgctcatcgctgacaccatgtttcgccattaaattatcgatgttgtcgataaaagacggcaggaaacgctctgcttccgccatcgccagcgggcaagtcgggaaactcacgcaagccatgctgttttcacgctgcggcgtgacggcattcattaacccgctctctttggcgatcttctcgatcttcgctttctcgctttccggtacaccggcgatgatcagattctggttcgccgtaatgcggaaatcgcctttgtggatcttcgcgatctccagcaggccggttttcagcggacgcgccggataatcaaggatgcgaccattttcgataaacagcgtcaggtgccagttatcatcaatgcccttaacccagccaatacgatcgcctcgtccggtgaactcatatggacggatcggttcaaatttgatccccgcgcgacgctccacttccgctttaaacgtctcaacccccacgcgctccagcgtgtatttggttttggcatttttacgatcggttcggttaccccagtcacgctgagttgtcacgacggcttcggccaccgccagcgtatgctccagcggcagatagccaaactcactcgcggtgcgggcgtaggttttcttgttgccgtgttcgatggaaagcccaccgcccaccaacaggttaaagcccaccagcttgccgttttcggcgatcgccacgaagttcatgtcgttggcgtgcagatcgatatcgttctgtggcgggatcactaccgtggttttgaatttacgcggcaggtaggtctggccgaggatcggttcttcatcagtagtggcgactttttcctggtcgagccagatctccgcatacgcgcgggtacgaggcaacagatgctcagaaatcttcttcgcccactcgtacgcttccgcgtgcagctggctctcgtaagggttgctggtgcagagtacgttacggttcatgtcgttagctgtcgccagcgcatcaagaccgacgctgtgcagcatctggtgcaccggtttgacgttctttttcagaatgccgtggaactgaaacgtctggcggttggtcaggcgaatgctgccatagatggtgttttcaccggcaaatttgtcgatcgcctgccactgtttagtggtaatcaccccacccggcagacgacagcgaagcagcatcgcgtggcgcggctccagcttctgttcagcacgttcggcgcggatgtcgcggtcatcctgctgatacatgccgtggaagcgaatcagcaggaagttgtcgcccttaaagccgccggtcagaccgtcgtttaaatcttccgcaatggtgccgcgcaggtagttgctttcatgcttcatgcgctcggcgtctgtcagttttccttcgaccactaaaggccctggatgtttttcgctcattagtagacatctcgctgataacggcgctctacgcgcagctcacttaaaaattcatccgccgcttcggtgtccatgccaccaaattcggcaatcacttccagaagtgcctgctcaacgtctttcgccatgcgattagcgtcgccgcagacataaatgtgggcaccatcattgatccagcgccacagctccgcgccctgttcgcgcagtttgtcttgtacgtaaactttttctttttgatcgcggctccaggcaagatcgatacgtgtcagcacgccatctttgacgtagcgctgccactccacctggtacaggaagtcttccgtaaagtgcggattaccaaagaacagccagtttttacctggcgcttcgtcggcggcgcgttgctgcataaaggcgcggaacggcgcaataccggtgcctgggccaatcataatcaccggggtttctggattggctggcaggcggaagttatcgttatgttcgataaatacgcggacttcgccctcttcttccacgcggtcagcgaggaagctggaggcaccaccggcacgggcgcggccttccacgtcgtaacgcaccacaccaacggtgacgtgtacttcgttctcgacttccgcctggctggaggcgatggaatacagacgcggcgtcagcgggcgcagcagattaattagcgcttcggcatcaagctgtgccggggagaaacgcaccatgtcaacaatcggcgtcgtcgcggcgtaatgctgtaacttcgctttatcgcccaccagcggcagcagtgtttcactgcgggtaagcgtggcgtaattctcaacaatgttggcggtgttgacggtcagttcgaagtgccactgtagcgcttcgttcagaggcaacgttttgccctcgacggtgacaggttcatcgcctttcagccacagcagttcgacaagttctttcaccagtgccggatcgttctgataccagacgcccagcgcgtcacccggctggtaacgcatgccgctgtcacctaagtcaatttcgatatggcgaacgtctttttcagagttacgcccggtaattttctggttaacagagaggctagccaccagcggcgcgtctttgctgtacgggctggtgtggatttcatttaccgcgccagtagcgacggattggctaggtgccgcgacaggcgcacggcttttaagcgcatcaaccacgcgggcgcgccactcgctggcagcagcctggtattcaacatcggcatcgacacggtcgagcaggcgttcaccacccagttccgccagcttgctgtcgaaatctttcccggactggcagaaaaattcataagagctatcgccgaggctaaacacggcaaacgcggtgttttccagctttggcgcttttttggagaacaggaacttatgcagcgcgacggcttcttccggcggttccccttccccttgcgtactcgtcactacgatgagcagtttttcgctggcgatttgtttgaatttatagtcgcccgcgttcaccagcttaacgttcagttttgctgctaataaatcatcacgtaatgcttcagcaacccggcgcgcattgccggtttggctggcggagataatagttatacccggcatttctgcggctggcgctggcgtcgctgcaagcgcagcaggctgctgattgagtacgccccagaaatagccagaaacccaggcaagctgggtgggagttaaatcggtcgtggccgcctgaaggcgtgccagttgctccgggttcaacggaagcaacgcggaaggtgggacctgtgtcgtcatgcgtcgttatgttccagtaagcaaagctgtttctgcgccctgtcagcgcccataaaacagaagagaaggtaaggttaacggggcaaacggtgtggattaaagacgggatagcgataactaataaccaaatcgactaacctgttttagcaatagtctttaacaacaaaatagattaaccaacctaatgaaaaacaaatgaatttagccaatcattaagataaatcagcgattttgcgcaacaaagtcgttttagataatgcgaaaaaacagcctttccggtactctacggcggttttatcgtcctgtagagaaattatgatgtccaccacgttatttaaagatttcaccttcgaagccgctcaccgcttaccacacgtcccggaagggcataaatgtggtcgcctgcacgggcattcctttatggtgcgactggaaattaccggggaagtcgatccgcatacgggctggattatcgatttcgctgaactaaaagcggcgtttaaaccaacctacgagcgcctcgatcaccattatctcaatgatattccaggtctggaaaacccaaccagcgaggttttagcaaaatggatttgggatcaggttaaacccgttgtgccgctgttaagtgcggtgatggtaaaagaaacctgcaccgcaggttgtatctatcgcggcgaatgataagagtgtgtcggcggtcaatttcccttaagtaacgctatgttagggtgttgtgttctggatatctggggcatgacatggaagacgactgcgacattattattattggtgccggtattgcaggcaccgcttgcgcgttacgctgcgcgcgagcgggtttatccgttttgttactggaacgcgctgaaatccccggcagcaaaaatctttccggcgggcggttatatacccatgcactcgcggaactcctcccgcaatttcatctgaccgcgcctcttgaacgacgcatcactcacgaaagcctttccctgttaacgcccgatggcgtaacgacgttttccagcttacagcccggcggtgaatcctggagtgtattacgtgcacgattcgatccgtggctggttgccgaagccgaaaaagaaggtgtcgaatgcatccccggagcgacggtggatgcactgtatgaagaaaacggcagagtctgtggcgttatttgtggtgacgatattctccgcgcccgttatgtggtgctggcagaaggtgccaacagcgtcctggctgaacgtcacgggttagtgactcgtcctgctggcgaagcgatggcgttggggatcaaagaagtgctgagcctggaaacatccgctattgaagaacgttttcatctggagaataacgaaggcgcagcgttgctgttcagcggcaggatctgtgatgacttacccggcggcgcatttctttatactaatcaacaaacgctcagcttagggattgtttgcccgctctcttcccttacgcaaagtcgtgttccggcaagcgagctgctgactcgctttaaagcgcatccggcagtgcgcccgcttatcaaaaacacggaaagtctggagtatggtgcgcatctggtgccagaaggtggcttgcacagtatgccggtgcaatacgccggtaacggctggctgctggtgggcgatgcgttgcgcagttgcgtcaataccggaatttccgtgcgcggcatggatatggcgctgactggcgcgcaggcggcggcacaaacgctgataagcgcctgccagcaccgcgagccgcaaaatctgtttccgctttatcatcacaacgtagagcgcagcctgctgtgggatgttctacagcgttatcagcatgttccggcgcttttgcaacgcccgggatggtaccgtacgtggcctgcgttaatgcaggatatttcccgcgatttatgggatcagggtgataaacctgttccaccgctgcgccagttattctggcatcatttacgtcgtcacggcctgtggcatctggcgggcgatgttatcaggagtctgcgatgtctgtaacgtaagatgttatcaggagtctgcgatgtctgtagcccgtaatctctggcgcgttgctgatgcgccgcacattgttccggctgactccgttgagcgccagacggcagaacggttgattaacgcctgtccggcaggtctttttagcctcacaccggaaggtaacttacgtattgactatcgcagttgcctggagtgtggcacctgccgtttgctgtgcgacgaaagtacactacaacagtggcgctatccgccttccggattcggcatcacctaccgctttggataaataataaggataatttatgcccctcttacacctgctccgccagaatccggtgattgctgccgttaaagataatgccagcctgcaactggcaatcgattctgaatgccaatttatttccgtgttgtacggcaatatctgcaccatcagtaatatcgttaaaaagattaagaacgccgggaaatatgcttttattcatgttgatttgctggaaggcgcgagtaataaagaagtcgttattcagtttttgaaactggtgaccgaggcggacggcattatcagtaccaaagccagtatgttgaaagcggcaagagcggaaggttttttctgtattcatcgcctgtttattgttgatagtattagctttcacaacattgataagcaagttgcgcaaagcaatccggattgtattgagatcctgccaggctgtatgcccaaagtgctgggctgggtgacagagaaaatccgccaaccgctgattgccggtgggctggtgtgcgatgaagaagatgcgcgtaatgcgattaacgcgggtgtcgtggcgctttccaccacgaataccggggtctggacgttagcgaaaaaattactttgacgggataatcgtaaccaattgaatttggtttgatttgtaggccgcacgccacatccgacattcagcgcctgatgcgacgcttgacgcgtcttatcaggcctacaagtccccaggccagaaccgtaggcaggatcatccggcaacacgttattggcaatctgcgtgaatgtttgtcaccagtgcctccagcaccactttccagtcatcaaccacgccaacatctgcctgactaaataccgcagcgctggcgtcatgattaatcgccaccacaaacttgctattgcgtacgcccgccattaacgctgctgcgccagaagcgccaacaacaatacacacctcaggtgccagcagatgtccggaaataccaatcactttttcagcatcaacgccaccgttcatcactcgcgcccgactgtagcccacttcggctcccagcttttctgccagcatagcgatttcctggttatctgcctctccgccctgccccaccaccagcacccgtctggcctcagctaatgggtcgcgggtaacatttttcagatcctctgtgctaaccagccagtccggaagcgcacccgggacaatgttcagttgttgcattccagagggcaacgtggcgtttttcgctgctcccgcctgacgcgccagggaaaggcatagcgggcgtttttctgtttgcagcgtcgccgttagcgcatttccccagtgggatttgcgcacgcttacggttggaatatctaagctagtcacctggcagatgcttgcaccatgtaaacgccaggccagccgggtgctcagttcatcgccaaacgttcccggcggaaagagaacaacgtccgcaggcgttcgctgccactgttccaccaacgcatccagcacctgttccgccactacaggctgaggttcaatctgccagtgcgccagggtacaaccgctgaaatcctgcgccgccagccagcttgctattgcggcattctcctgatttattgtcacaattgcgatattcatggctgcatcctttggcgtaaatagtcctgccatagcttttgagctttttctgctaccgtttgcccatcaatcagcgtcgctccgcgtcgttgctctgctcttgccagttgcagacactgcatcgctggcatttcggcagcaacagttttacggataatttctgctttccccgcagccattcgctggcgcattcccggtactggcaaggccacttcaccgcactgacgcacggcaatcaccgcaggcaagcgaacccggcaacaacgcaacccatgttcagtacgctgttcgagggtgataaacagcgcgtcgagagtgaaacgctccacctgggtgaagcagggccagcccagcatttccgccagcaaaaatggcgtttgcccattctgcccttcgctgctttggcagccggtaattatcagatccagcggattctgatgctgccattcggcaatatggcgagcgacaaattccggcgcaaagcgcagatctgccgccgtctccagcaatacagcttcctcaaacccaagagccatgagatagcgcagccagtgcaatgcccgttcatcccccatgctcaacgcggttaaagacatcggcgtaccgttttttctctgcgccaacagcagcgcggcagcggcctgttcatcagcaccgagtaaacttcgcagtaggctaatatccggtccgcttttaccctgagccgccgcctgccactctttttccgccagcattccggcatccggttcggctttaaacgctaacagaatgttcattcgcacctcctacatttcccgccgccaccagcgggagggctttagtttctggtgcccatagccaggtcacaacaaaaccaaccaacaacactgtcgccaggagcaataaggtgacttgcattccccactgcgccagcacccacggcagcaggccagtacttaccgccgcgccaagtcgactcatggcagtggcaaaaccgacgcccaggctgcgaatgtcagtaggaaaactttccgcaggcaaaatgcccaccagattactgactgcgctaatggtggtgctgaagagaacaaaaagcagcagcgttaaactactgccggaaggcaaacaggccatgactaccagcgttgccgccagcagcaaaaaacttcccagcaaaaatttgcgatgtgccagcaggtgcgtcagaactaatcccagcagcgcgcccacaattaacaacgcattaagcatcaggctggcagtcagcgcatcttccagaccaatagtctgggcgatagttggcagccaggtataaatcacaaaccatgggattacgaggcagacaaagaagacgctgttaaacgccgtgcgccgccagtaacggctagagaacaaggttttgatgtgtttatgggtcgccgttaccacttcatcgcccagtaaaacatggggaccaaaatagcgatgcacgatagcgtgagcttctgcaaaacgcccctggcgcagtagccagcgtggactttctggcgttccccagcgtaataacgtaatcaacaacgcgggcagagctgcgcttgccagtagccagcgccaggcctccgggttttcggaaataaagtgatgtccggcaatacttgccagcacatagcctacggtccacaccacgctgaatgcgcccagcaaaataccgcgatggcggcgcggggaaaattcagccagcaaggtgtgacctacactataatcgcctcccagaccaatgccaatcaaaatgcgcagtccaataagatgctctggcgtggtggcaaaaaattgtaaaaagctagcaagcgtaatcagcaaaaagctgaaggtgaagattttttgccgaccaatatggtcggagatccacccaagaaccaggctgccaaggaacaaaccaaggagcgcgctgccgccgatcattcccgccataaacggcgtcagttgcatggcgggcgtaagctgaataatggcgtaaccaatgacgccgagaacataaccgtcggtcaggtgtgcgccgaaagtgagcgcagcaatgcggcagtgaaaacggttaagcggtaaatcatccattcgcaccggactagtgttcatctttaccccttcattgtccggtaataagaacggcttctcgcctgagaagccgaaaaggcaacgccccgtcatcgcggaacgctgcctgacacattatttttcaatcggatagatagtacccgtattcataatgccattaggatcgaactgctttttcagcccttccagcaacgcccacgcgctgccgtgttccagtttgctccagtgaacgcgatgtttaccgataccgtggtggtgcaccatgctaccgccgaggcgaatggtttcttcacagatgatcttgttgagcggattgtggtacttgtcgatttcctcttccggcttacagtcaacgacgttgtaatcgtagacgaagtacatgttggtgccgttctgatagctatgagaggaatgaccgcccagcatggtgatgtcgtcggcgtgcgggaactcagtacgaatacggttaataacgctttcgtagatttcgtggatgcagctccagcagccggatacttcggtggtaaagcccatgttgccggttttgaggatctgcacacgttcggcagccactttatccggtccccagttcaggttgttaaaccaggtttcgatcagcttgctgtccacgcgctggcattgcgggtagcgggcaacgatttccgcaatcccttcgcccgtcaccttcgcaatgcgagggttaccttcagccataaagatcagcacgcattttccgtcggcaaaatgggtgaagtgttgggtgccatcttcagcgtcatacaaacgagcgatactcggacgatacccttccaccatgatttcacgcaggatgttgaagccggttttcatgtcttccaggatatagccgtagaagaggttgttttccggggtgaatttaaagattttcactgttacttcagtgatatagcacaatgcaccttcgttgccgatgatgatgtgacgaatgtccgggccagccgcgcggcgtggcacgtttttaatgcgtgtgacggtgccatcagccaatactgcttccagaccaacgaccatatcttcgattgcgccgtagagtgtggagaactgcccgatacttcgggttgctaccaggccgcccatctgcgccagcggcttactctgcggagaatgccccgtggtgtaacctttttcacgcaacgcgttttccagcacttccagcggaacaccacattgcgccgtcgcctgcatattctcaatatcaatattaatgatttgattcatggcggagccgtcgagcaccacgctgttttctacaacagtttccagcccaccttcggtggcggaagcaccggtacgcggcacaccgttaattttgtgcgcattcataaaattcagcacacgggatacttgctctgtggaaccgagttttacgaccgctgccggaatcggcaaagtataaatgccatgaatatccggaaatttacgaaaacggtcaatactgtttttctttaatactgtttcatcggtaattacgcgatctgcaccaacaatttcctttagctggtcgacaatcgctgcgcgagataaagacatagtaattccttcctgataataaaaatggaataatcattaataagagaaaacagaaaccaccgttatgggttagcgcactaaataaccgccatcaaccactaataaatgcccgttgacataattgcttgccggacttgcgaggaatacggctgcgcccattaaatcctgagtatcgccccaacggtttgccggaatatgatcaagaacgcgctgattggtttctggattactgcgtgtcgccagcgtaatatctgttgcataatagccaggggcgataccatttacctgaatattatattgacctagttcatcacaataagctttggtgaacccggcaagagcatgtttagtggcagaatatgcaggactccattgtccacctaagtaagagaacaaactacagatattaataattttgccgcttttctgcgggatcataatttttgcagcttcatagcttaactcgaatgcggcggtcaggttcacatcaatcatcggatcccagtcggcacgaccgaagtccagcaccttattcagcttacaaataccggcattgttaaccagaatatcaactgtaccgaaacgctcacagcaagcagcgataatcttctgcggcgcgccttctgcggtgatacccacctgcatgaagtccacctcaacaccctgtttttcaatcatttcctttgtttcgccgttatctttgacgaaactaggaataaagatatttgcgccagctttggccaacgccatggcaaatgcctggcctaaaccgctattcccaccggtaacaattgcggttttacctttcagggagaaaaaatccatactgaacgcattgagagattcgatactcatagttagctccaatttccgtaaggcaaaaaaaaagaaaggtaacttcccccgcgagagggaagttacctttctcattatctctggtaactggagataatttttagcataagggcataactgctaatgtgatcgtaatcacagtgtgatattcgtattgtcaaataattttaaaaagcagaagcgtgattactctcacacaacacctctgctttccatgttatttattatttcaattactagagacctgagaaaagtaatccacctgaaagggcggcttacttttctcttttttttgtctattacaaatgggaatacgatatgcaacacaacagttatcgccgttggataaccctcgcgataattagttttagcggcggcgttagtttcgacctggcttatttacgttatatttatcaaattcccatggcgaaatttatgggattcagcaataccgagataggtttaataatgagtacctttggtattgcggccattattctttatgcccccagcggcgttattgccgataaatttagtcaccgcaaaatgattacttccgcgatgatcattaccggattactgggtctgttaatggcaacgtatccaccgctgtgggtaatgctctgtattcagatcgcctttgcgataacgacgattttaatgctgtggagcgtgagcattaaagctgcaagcttgcttggcgatcatagcgagcaagggaaaattatgggctggatggaagggctgcgcggcgtcggtgtaatgagcctggcggtgtttaccatgtgggtcttttctcgctttgcaccggatgacagcaccagcctgaaaacggtcattatcatctatagtgtggtttacatcttgttggggattctgtgctggttttttgttagcgataacaacaacctgcgcagtgccaataacgaagaaaaacagagtttccagcttagcgacatcctggccgttttgcgtatcagcaccacctggtattgcagcatggtgatttttggcgtcttcaccatctacgccattctgagttactccaccaactatctgaccgaaatgtatggcatgagcctggtggcggcgagctacatggggattgtgatcaacaaaatattccgcgcgctgtgcggcccacttggcggcataatcaccacctacagcaaagtgaaatcccctacccgcgtgatccaaatcctttccgtactcggcctgctgacgttaactgccctgctcgtcacgaactctaacccgcaaagcgtcgcgatggggattggcctgattttactgctgggattcacctgttacgccagtcgcgggctgtactgggcctgccctggcgaagcgagaacaccgtcttacattatgggcaccacggtaggtatttgtagcgtgattggattcctgccggatgtcttcgtttacccaattatcggccactggcaagacaccctgcccgctgcagaagcctaccgcaatatgtggctgatgggcatggcggcgcttggcatggtgattgtctttacctttttgctgttccaaaaaattcgtactgctgatagcgcccccgcaatggctagcagcaagtaagccaggaaaattacaggagaaaaatcatgagcaaaaaatacatcatagggattgatggcggaagtcagagcacaaaagtggtgatgtacgatctggaaggtaacgtggtttgcgaaggcaaaggcttattacagccgatgcacacgccagatgccgatactgcagaacatcctgacgacgatttatgggcaagtttatgttttgccggtcacgatttgatgagtcagtttgccgggaataaagaagatattgtcggtattggtctgggatccatccgttgctgccgtgcgttattgaaagccgatggcacgcctgctgcgccgttgattagctggcaggatgcacgcgttacacgcccttacgaacacactaaccctgacgtggcatatgtcacctcttttagcggttatctgacgcatcgcttaaccggcgagtttaaagacaatatcgccaactattttggtcagtggccggtggattataagagctgggcatggagcgaagatgctgcggtaatggataagtttaatatcccccgtcatatgctgtttgatgtgcaaatgcctggcaccgtcctcggacatatcacaccacaagccgcactggcgacacatttcccggcaggactgccggttgtttgtaccaccagtgataaaccggtagaagctctgggggccggattactggatgatgaaacggcggtaatttctcttggcacttacatcgcattgatgatgaacggcaaagcactgccgaaagatccagtagcgtactggccgattatgtcttctattccgcaaacattgctgtatgaaggttacggtattcgcaaaggcatgtggacggtgagctggctgcgcgacatgctaggcgagagcttaattcaggatgccagggcgcaggatcttagtccggaagatttactcaacaaaaaagcttcttgtgtgccgccaggctgtaatggtctgatgacggtgctggactggctgaccaatccgtgggaaccgtacaaacgcgggattatgatcggctttgattccagcatggattacgcatggatatatcgtagcatactggaaagcgtggcgctgacgctgaagaacaattacgacaatatgtgtaatgaaatgaatcactttgcgaagcatgtgatcattactggcggcggtagcaacagcgatctgtttatgcagatttttgccgacgtgttcaaccttccggcacgacgtaacgccattaacggttgtgcaagcctgggggcagcgattaatacagcggtaggtctggggctatacccggattacgcaacggctgtcgataacatggttcgcgtgaaagatatctttataccgattgagagcaatgccaaacgctacgacgcgatgaataaaggcattttcaaagacctaaccaaacatactgatgtgatcctgaaaaaaagctatgaagtgatgcatggggaattggggaatgtggatagcatccagagctggagcaatgcgtaagtgaggaaggccgggcgggaaactgcccggcctgaacatacctgaatggttatccccgctgacgcggggaacataagttcgacaacttaaaaaatgataacaagtccggtttatccccgctgatgcagggaacataataaaaactttaactagttcggtttatccctgtttttacaaggaatattaactacactcgatgtctttagaataaaagacaatacgaatcgcactttatcaattttcacttaaagtatgaactggatatctttattcataagaactattcatcaacagcgtatagaggcggttatgtaaaaccactcattagcctcaaaacaaagacaaacttccagatttattacttaaccaatgaataacaagcttaaaaaatatactgttattctaaagaaaaaattaacaggcattaattcaatattaaaaaaataatagattaaaatttcttaacgatttaagaatcatacaaataacactttgattaaatttaattttttgtatcgataattgtgaacctctctggcatggagaactattttgaacatgaggtgttacgtggatatgttgcttattacaagtactgctaatataaaaacttgagaaagagataacgggttatatggtggtttatccccgctggcgcggggaactcgacagaacggcctcagtagtctcgtcaggctccggtttatccccgctggcgcggggaacacctgttttcgcaaatctatggactattgctattcggtttatccccgctggcgcggggaacacgggcgcacggaatacaaagccgtgtatctgctcggtttatccccgctggcgcggggaacactggctctgcaacagcagcacccatgaccacgtcggtttatccccgctggcgcggggaacacgaaatgctggtgagcgttaatgccgcaaacacaggtttatccccgctggcgcggggaacacattacgcctttttgcgattgcccggtttttgccggtttatccccgctggcgcggggaacactctaaacataacctattattaattaatgattttttaagccagtcacaatctaccaactttatagtatcacacaaacaacacatccattatgttaaagagcacttaatccattgattaaaaaggtaaatatttaaaataactctatacaaactaaaatctaccaaactttaccgcaataattttcactccagcgaaaaattaatgccacagaatttgtagagaatgctaatgattagccctggatgggtaaaatggaggagttttcagaggcgacaaacaatataaatgagtagaagtctttacaggttccacccatttataacgcttataaatgtttaatcaggcaatatttagatatttatgtgtttgcatgctcaaacgccaattacgcgcaatgcaggtttcaatgcacaaacgtgtggcatcatccttttggctaatcggctgcagtgcaatgactcgcggtttatcatcggtcagcgttgccagtagttcatccagtgcttcaatatcgcgtacgcgccccactggatgcttgatttcgttggctcgctccagtgcctgactcaacacttcatagccgccgcgcatgttcagctttgggcttacggtaacccaggtattcggtgtgcagcgtacctcatgagtaccactggtttcgatctggcagctaaaaccgttcttttcgagcagatcagtcagtggcagcaaatcatgaatgcaaggctcaccacccgtaatcaccacatgccgcgcggtgtatccctggcgaccaatgacagccagcaaatcttcactgctcgcagccccccacttatcactctctttggtcttcgccagaatgctgaaaagggagacttcccgatcctcaagcttttcccaggtgtgtttggtgtcgcaccaggcacagccaaccgggcatccctgtaaacgaataaaaatggcgggaacgccggtaaagtaaccctcaccttgcagggtctggaacatctcgttaatcgggtactgcatagcattctctgtgaagtggataattgttaattattgcagatcctgccacaacaatcatgtcttattaacattctgttacaggcaggtttaaagaaaaatgcgaaacatatcgttaataattaaagggagtaacgtattatgtcagaagaaaataaagaaaatggatttaatcatgtcaaaacattcaccaaaattatatttattttttctgtattagtttttaatgataacgaatataaaattaccgatgccgccgtcaatttatttatccagatttaatgagaaatttataatgcgctatttcatactaatgttcactttcgtatgttcctttgttgcagcccaaccaactattgtcccacaattacagcaacaagttacggatcttacgagtagcttaaacagtcaagaaaagaaagaactgacgcacaagttagaatctattttcaataatacccaagtgcaaattgccgtattaattgttcccacaaccaaagacgagacaattgaacaatatgctacaagagtttttgacaattggcgtttaggagatgccaaacgtaatgatgggatactgatcgttgttgcctggagcgatcgcactgtccgcatccaggtaggttatgggctggaagaaaaggtaaccgatgctctggctggagatatcatccgtagcaacatgatacccgcatttaaacaacaaaaattagctaagggattagagctagctataaacgctttgaataaccaactcactagtcaacaccaatatccgactaatcctagtgaaagtgaaagtgcgtcttccagtgatcattattactttgctattttttgggtatttgcagtgatgttcttccctttctggttttttcatcaaggcagtaatttttgtcgcgcatgtaaaagtggagtctgtattagtgcaatctatcttttagatttattcctgttctccgataaaattttttccattgctgtattttccttcttttttactttcaccatatttatggtctttacctgtttatgtgtacttcagaaaagagcatctggtagaagttatcatagtgacaacagcggttccgctggaggcagtgatagcggcggatttagcggcgggggcggttcttctggaggtggcggcgcatccggccgctggtaactcaaccataaaaaatgccagcccggaggctggcatttttaaatcagataaagtcagtcttatgcctggcctttgatctctttacgaccgttgtacggtgctttttcgcccagagcttcttcgatacgaatcagctggttgtatttagcaacacggtcagaacggctcatagaaccagttttgatctggcctgcagcagtaccaacagccaggtcagcgatggtagcgtcttcagtttcgccagaacggtgagagataactgcagtgtagccagcatctttcgccatcttgattgcagccagagtttcggtcagagaaccgatctggttgaatttgatcaggatggagttagcgatacctttttcgataccttctttcaggatcttggtgttggttacgaacaggtcgtcaccaaccagctggattttgtcgcccagaactttggtctggtatgcgaaaccgtcccagtcagattcgtccagaccgtcttcgatagaaacgatcgggtactgtttggtcagttcttccaggaagtgagtgaattcttcagaggtgaacgctttgttgccttcgccagccagaacgtatttaccatctttgtagaattcagaagctgcgcagtccatcgccaaagtgatgtctttgcccagttcataaccagcagctttaacagcttcagcgataacagccagagcttcagcgttggaacccaggttcggcgcatagccaccttcgtcaccaacagcagtgttcatgcctttcgctttcagaacttttgccaggtgatggaaaacttcagaacccatgcggatggcttctttcacagttttcgcgccaaccggctgaatcatgaattcctggatatcaacgttgttgtcagcgtgctcaccaccgttgatgatgttcatcatcggaaccggcatagagtatttgcccggagtaccgttcagttcagcgatgtgctcgtacagcggcatacctttagcagctgcagcagctttggcgttagccagagatacagccaggattgcgttcgcgccgaatttggatttgttttcggtgccgtccaggtcgatcatgatcttgtcaatgccagcctgatctttagcatctttgccaatcagcgcctgagcgatcgggccgtttaccgcagcaacagctttggttacgcctttacccaggaaacgggatttgtcgccatcgcgcagttccagagcttcacgggaaccagtagaagcaccactcggagcagctgccataccgacgaaaccaccctccagatgtacttcggcttcaacagtcgggttaccacgggagtcgatgatttcacgaccgatgatttttacgattttggacattaggttttcctcaagtcactagttaaactgaaactccagacaaacaacgcgtacccagggtacgcgttgccgctctaacttttttacttacttcgcctgacgtttctggaactcgctggcggctttcacaaagcctgcaaacagcgggtgaccatcacgtggagtagaagtaaactccggatggaactggcaagccacgaaccacgggtgattcggaacttcgatgatctcgaccaactgatcatccccggaacggcccgcaacgcgcagacctgcatcttcaatctgtttcaacagcatgttgttgacttcgtaacggtgacgatgacgctcaacaattgtcggcgcattgtacagctggcgaaccaggctatcgtcaaccaactggcactgctgtgcgccgagacgcatggtaccgccgagatcgctcttctcgctacgaacttcaacgttgccgttttcatcgcgccactcggtaatcagcgccacaaccgggtacttacagtctggcacaaattccgtagagttggcgttctccatgttggcaacatggcgagcgtaatcaattaacgccacctgcatacccaggcaaatgcccagataaggaatattgttctcacgcgcaaaacgcgcggtcgtaatcatgccttctacgccacgatagccgaaaccgccaggtacgaggattgcgtccagacctttaaggatttcaacgccgcgcgtttcaacatcttgactatcgatcagtttgatgttgacgctgacacgattcttcagcccaccgtgtttcagtgcttcgatcacacttttataagcatccggcagttcaatgtacttgccgaccataccgatggtgacttcacttaccgggttcgcttcttcgaagataacctgttcccattcggacagattcgcttccgggcagtttaagctgaatcgtttacaaatataatcgtccagcccctgagatttcaacaggcccggaattttatagatggaatcgacgtctttcagagaaataaccgctttttccggaacattacagaacaatgcaatcttcgcacgttcgttcgccggaacagcgcgatcactacgacaaatcaggatgtcaggctggataccgatggagagcagctcttttacagagtgctgagtcggtttggttttgacttcaccagacgctgccatgtacggcaccagcgtcaggtgcataaacagagtgtgctcacggccaatttcaacagccatctggcgaatcgcttcgaggaacggcaaggattcgatatcacctactgtaccgccgatttctaccagtactacgtcatgaccttcgccaccttccagcacgcgctctttgattgcgttagtgatgtgcggaataacctgcacggttgcgccgaggtagtcaccgcggcgttctttacgcagaacgtcagagtagatacgacccgtggtgaagttgttgcggcggctcattttggtacgaatgaaacgctcgtagtgccccaggtccaggtcggtttcagcgccgtcttcagtaacgaacacttccccgtgttggattgggctcatagtacctggatcgacgttgatgtacggatccagtttcatgatggtcacattgaggccacgggcttcaagaatggctgcgagggaggctgcggcaatgcctttacccagagaggatacgaccccgccggtcacaaaaatatagttcgttgtcatgctgaacctgagaagttaggttgaaaagacgatggaataaccaagacgggaaagcagtatacccgaacatgacctgtgccacaaactttcattatccctcctcttcgccagcgcactattgaaatcaggagtgagaaaatagcccctttggggtaaatgtttttgacgcaaatcaagcgcttgtcatttaaaaaatgacacaaatggcgcttgaccgcgtaattcccttagagatcaatttcctgccgttttacctgttgccagacttcttccattgtttcgaggtcaacacctgtcatttccagtccacgcgcggcaacaatacgctccacttcgcgaaaacgacgctcgaatttttcgttcgctttttgcaatgcgatttctgctttcgtccctaaatggcgagccagattaaccgtggcaaacagcaggtcccccatttcctcctccagtttagcctggtcgacaacagcctgccgcgcttcgtacatcacctcgtcgatctcttcgtagactttatcgactaccggaccaagcgtcgtccaatcgaagccaacgttggcgcaacgtttctggattttttgcgcacgcattaaagccggtaaactacgaggaatatcgtccagcgcgctatgctgcgctttctgcgcgcgctcttcggttttgatttgctcccaacgggcaagcacttcactactgttttcggcagaactatcagcaaaaacatgcggatggcgacgctctaatttatcgctaatagcagcgcaaatatcattaaagtcaaagcgcccttcttcctgagccatttgcgcgtaaaacaccacctggaatagcagatcgcccagttcaccgcgaagatcgtcaaaatcttcacgggcgatggcgtccagcacttcgtaggtttcttcaagggtgtaaggcgcaatggtggcaaatgtctgctctttatcccacgggcagccgttttccggatcgcgcaggcgctgcataatagtgagcaaacggtcgatttgattcattgaattgtcctgaaaattgcgggtctgtcaggtggaaacctgtgaccagaatagaagtgagttagtaacattacccaatcagtacgttaattttggctttaatgagttgtaattcctctggggcaactgttcctttcttcgttgctcctcttgcccgccaggcgatactttttacctgatcagctaacgctacgccatcacgttcctgaccggataaaacaacttcgaacggatatcctttactttgcgttgtacaaggaacacacagacacatacctgttttgttgttgtacatgaaaggactcaggacaacagctggacgatgtccagcttgctcgctaccttttgtcgggtcaaaatcaacccaaatcagatcgcccatatcgggtacgtatcggcttaccattaccagacttccttatctttcggctctccccagtcgatattctcgtggaggttttccggcgtgatgtcgttgaccagttcagcaagcgtaaatacgggctctttacgcactggctcaataattaatttgccatccaccaggtcaatcttcacttcatcatcaatattcagattgagcgcctgcattaacgtagccgggatccgcaccgccggactatttccccaacgctttacgctactgtggatcataaccctttcctcaaaccgctatcatatgtagatacagtatatatcaatctacattgtagatacgagcaaatttcggcttaactcccgtgcaaccgacgcgcgtcgataacatccggcacctggttgagtttacccagcacgcgccccagcacttgcaggttgtaaatctcaatggtcatgtcgatggtcgccagttgctgtttggtgtcgctacggctggcaacgccaagcacgttcaccttctcgttggcgagaatggtcgtgatatcacgtaacaacccactacgatcattagctaccacgcggaccaccaggctatatccggcggagtagctctcaccccataccgcgtcaacaatgcgttctggcgcatgggagcgcagttccgccagttgttcgcaatcggcgcggtgtacactaataccgcgcccctgggtaatgaagccgacaatctcatctccaggaatcggctggcagcagcgcgcgatgtggtgcatcaggttgccaacaccttcgactaccacgcgaccgttatctttactgcggttttgcggcgtgtagcttttttgctgaagttgcttcagcgcggcggcgtcctgctcttcggcactcggcttattaaattggctttgcaggaagttcaccatctgattgagacggatatccccgccaccaatcgccgccagcaactcgtcgacatcattgaagttgtaacgcggcagcagatgtttttctgcttctttcaggctgatccccagatgttccagctcgtcgtcaaggatttgccgcccagccagaatgtttttgtcacggtcctgtttacggaaccaggcgtgaattttgctacgcccacggctggttgtgacgtaaccgaggtttgggtttaaccagtcacggctggggttcggctgtttctgggtgataatttcaatctggtcgcccatctgcagctggtaggtgaacggcacaatgcgcccgccaatttttgccccgatgcagcggtgtccgacatcactgtggatgtggtaagcgaagtccagcggcgtacttcccgcaggcaaatcaacgacatcacctttcggcgtaaagacgtacacccggtcgtcaaagacctgactacgtacttcgtcgagcatttcgccggaatcagccatctcttcctgccacgcaatcagtttacgcagccaggcaatccggtcttcatgtccgctacgtgcgccgccagcagccgcgccctctttatatttccagtgcgcagcaacacccaactctgcatcttcatgcatctgtttggtgcggatttggatctcaacggtttttccacccggccccagaaccacggtatgaatagactgataaccgtttggtttcgggttagcgacgtaatcgtcaaactcatccggcaggtggcgatagtgagtgtgcactatccccagtgcggcatagcaatcctgtaaacgctcggcgacaatacgtaccgcacgcacatcaaacagctcatcaaaggcgaggttctttttctgcattttacgccagatgctgtagatgtgtttcggacgaccatacacttccgctttaacgccttcagctttcatctcagcgcgcagatgaccaacgaactcttcgatgtagtgttcgcggtcgagacgccgttcatgcagcagtttggcaattcgtttgtattcggttggatggaggtaacggaagcagtaatcttccagttcccatttcagttgtccgattccgagacggttagccagcggtgcgtagatgttggtacactcttttgccgccagtacacgttcatcttccggcgcatcttttacttcgcgcagatgagcaatacgctccgccagtttgatgactacgcagcgaaaatcatcgaccatcgccaataacatccggcgaacgttatcgacctgttcggaggaaacagaatcagtgtgcgtcgctttcagctggcggatcgccgccatatcacgcacgccgtgaataaggttaacgacgctcttaccgacgctctcacgcagcacatcttcgctgactacgttggcatccgccagagggaaaagcagcgccgcccgcagcgtgtcaatgtccatacttaatgtgctgaggatctccaccatctcaacaccacgccacaataacagactggcatccggatgcccctgcgtctgttgcagacaatacgcccaggtttcggctaagcactcacagctcttctggctggtaatacccagacttgcgatccatttttccggatcaaattcaccagccttattgatatgtgcacttcttaccgcaaccatcgtcctctcctttagggaccagacctgccgaaatcggcaaatcgcaattatttaacgcggctgaaaagtaccatgctttccagatgtcccgtgtgtgggaacatatccagcatcgccagtcgcgcaatggtatatcctgcttttaataacgcttcgctatcccgagccagcgttgcagggttacaggatacataaactatacgaataggttccagttttataatttgctgcataacacctgcggcacctgctcgcgccgggtccagcaacactttatcgaagccgtttttcgcccacggctgctttgtgacatcttcttcaagattttcgtgataaaacgtcacattctgtaagccattaagacgcgcattctgctggcctttttccaccagcgccggaacaccttctacaccgaccacactggcagcttgtgtcgccaatggcagtgtaaagttgcccataccgcagaacagatccagtacgcgatcttcaggttgcacatccagccattccaacgcacgcgctaccattttttggttcacacccgcattgacctgaataaaatcgcgcgggctaaaagttaagcgcaacccgttactgtcataccagggcatctcaccagagacggtttcgagtatctcactatcgggggcgagatacagatccaggccttcagaatggctaaagcgttccagtttttcgcgatctgcgctacttagcggtgcggtatggcgcaaaatcatcagcgtgccgctggttgcctgtaccagttcaacatgaccaagatggcgcatagcttgtaagctgcccagacatgccctgactttgggcagcaatgcttcaagttggggcgctaaaatggggcattgtttgacgtcgacaatgtcactggagcccgctttgcgaaaccccatctgaagttgctgtgttttcggtaagtagttcagacttaaacgcgcgcgacggcgatagccccagggaacatcggcgatcacttcagagacatcgtgtttcattaatcgggcgagtgccgcacttttgcttcgctgctgtaaatccacgctggcgtgttgttgctgacagccaccgcatacgccaaaatgaggacagcgtggcgtttcgcgttccgggctatcgcttaaccggcgtacgactttagcgcgggcatactgttttttatcttcagtaacagtaacttccgcgttttcctgcggcaataatccggggataaatagcgttttgccgttatgtcgcgccacgccctgaccaaaagagtcgaggtcgttgacactaacggttatgatctgacgcgtcgtcgtgcgtcgttttgcagagtagaattgcgccattggcgagactttctcaatttaacagtgtgaccttaattgtcccataacggaactccatgaccaactacagcctgcgcgcacgcatgatgattctgatcctggcaccgaccgtccttattggtttattgctgagtatctttttcgtcgtgcatcgctataacgacttgcagcgtcaactggaagatgccggtgccagcattattgagccgcttgcagtttctactgaatatggcatgagcctgcaaaatcgcgaatctatcggtcagttaataagcgtactgcatcgtcgccattccgatattgttcgcgcgattagcgtttatgatgaaaataaccgactctttgtcacctccaattttcatcttgatcccagtagtatgcagctcggcagcaacgtgccgtttcctcgccagctcactgtcactcgtgacggcgatattatgatcctccgcacgccgattatttctgagagttactcccccgacgaaagccccagtagcgatgccaaaaatagtcaaaatatgttgggatatattgcgctggagctggatcttaaaagcgttcgcttgcagcaatataaagagatctttatttccagcgtgatgatgctgttttgtatcggtattgcgcttatttttggctggcgcttaatgcgcgatgtaaccggtccgattcgcaacatggtgaataccgtcgaccgcatccgtcgcgggcaactcgacagccgggtggaaggatttatgctcggcgagctggatatgctgaaaaacggtatcaacagcatggcaatgagcctggctgcttatcacgaagagatgcagcacaatatcgaccaggcgacgtccgatctgcgtgaaacgctggagcagatggaaattcagaacgttgagttagatctggcgaaaaagcgcgcccaggaagcggcgcgtattaaatccgagtttctggcaaatatgagtcacgagctgcgtacaccactgaatggtgttattggctttacccgcctgacgctgaaaacagaattaacaccaacgcagcgcgatcacctgaatacgattgaacgtagcgcaaataatttgctggcaattattaatgatgttctcgacttcagcaaactggaagcaggtaagctgattctggaaagtattccattcccactacgcagcacgctggatgaagtcgttactctgctggcacattcttctcacgataaagggttagaactgacgctcaatattaaaagcgacgtgcctgataacgtgatcggcgacccgctgcgattacagcaaatcatcactaacctggtggggaatgcaattaaattcaccgagaatggcaacattgatattctggtagaaaaacgtgcgctgagtaataccaaagtgcagattgaagtgcagattcgggataccggcattggtattcctgaacgcgatcaaagccgcttattccaggccttccgacaggctgatgccagtatttcccgccgtcatggtggcaccgggctggggctggtgattacacaaaaactggttaatgaaatgggcggcgatattagcttccatagccagccgaatcgcggtagtactttctggttccacattaatctcgatctgaacccgaacattattatcgaagggccatccacccagtgcctcgcaggtaagcgcctggcctatgtcgaaccaaactccgcagcagcgcaatgcacgctggatattttaagtgaaacgccgctggaagtggtttatagcccaacgttctccgcgctgcctcccgcgcattacgacatgatgttgttaggcatcgcggtgaccttccgcgagccgctaacaatgcaacatgagcgattagcgaaagcggtaagcatgaccgatttcctgatgctggcacttccttgccatgcacaagtcaatgctgaaaaactcaagcaagatggtatcggcgcgtgtctgctgaaaccattaacacctacacgcctgttgcctgccctgacggaattttgtcatcacaaacaaaacacgcttttgcctgtaaccgatgaaagtaagctggcaatgacagtcatggcggttgatgacaaccccgctaacctgaaacttatcggcgcattgctggaagatatggtgcaacatgtggaactttgcgatagcgggcatcaggcggttgaacgggcgaaacagatgccgttcgatttgatcttaatggatattcaaatgccggacatggatggcattcgggcctgcgaactcatccaccaactcccgcatcagcaacaaacgccggttatcgcggtaacggcgcatgcaatggccgggcaaaaagagaagctgcttggcgcagggatgagcgattatctggcgaaaccgattgaagaagagcgattgcataatttgttgttgcgctacaagcctggcagcggtatttcctctcgcgtcgtgacgcccgaagtcaacgaaattgtggtgaacccgaatgcgaccctcgactggcaactggcactacgccaggcagcaggaaaaaccgatttagcgcgcgatatgctgcaaatgttactcgatttcctgcctgaagttcgcaacaaagttgaggaacagctggttggagaaaacccggaaggcctggttgatttgattcataaactgcatggcagttgcggctatagcggtgtgccacgtatgaagaatctctgccaactgatcgaacaacagctacgtagcggtactaaagaagaagatttggaaccggagctgctggaactgttggacgagatggataatgtcgcgcgcgaagccagcaaaattctcgggtaatggatgtcttgtcgagtagcaatcggctttttatgacgctggtttcagattggtgacaaagtgcctgtgtttatgccggatgcggcgttaacgccttatccggcctacaaaaccaattaaattcaatgaattaaaaaatgatgtagacctgatacatagcacaacaggctattttgcgtttagcatcagtctcaaaccggctccagatagagccggttttggttttctgtcttaacgcaccatgcacgggcgcttgttatcgaacgtccagccaggaatcagatactgcattcccatcgcatcgtcacgcgcgccaagcccgtgtttctgatacagctcatgggctttcatcacttgatccatatcgatttctacacccagccccggtttttctggcacctgtaccagcccgcctttgatctcaaacggttctttggtcaggcgctgattgccttcctgccaaatccagtgcgtatcaatagcagtaattttacccggtgcagcggcggcaacatgggtaaacatcgccagggaaatatcgaagtggttgttagagtgactaccccaggtcaggccaaattcatggcacatttgcgccacacgtacgctaccttgcattgtccagaaatgcggatccgccagcgggatatcaacggattgcagggagagcgtatggcccatttgccgccagtcggtggcgatcatattggttgcagtcggtagacctgtcgcgcgacggaactctgccatcacttcacgcccggagaaaccttgctccgcaccacacggatcttctgcataagccaggctacctttcaggtatttaccgattttaatcgcttcgttcaggctccaggcaccgttaggatcgagcgtaatacgcgcctgcgggaagcgttgcgccagtgccacaatagactcggcctcttcttccccggccagtacaccgcccttcagtttgaaatcgttgaagccatatttttcatatgccgcttccgccaggcgcaccaccgcatccggcgtcatcgcttcttcatgacgcaggcgataccagtcgcaactgtcatccggctggctttgatacggcagcggcgtggctttgcgattaccgacgaagaacagataaccgagcatttcgacttcgctacgctgttgaccatcgcccagcaggcttgccacgtttacccccagatgctgccccagcagatccagcattgccgcttctatcccggtaactacatgaatagtggtacgtaggtcaaatgtctgcaaaccgcgcccaccagcatcacgatcggcaaaagtattacgcaccagcgtcagaacgtttttgtattcacccagcgttttacctaccaccagcggaatcgcatcttccagcgttttacggattttctcgccgccgggaatttcccctacgccagtgtgaccagaattatctttgataatcacaatattacgcgtaaagaacggtgcgtgtgcaccactcagattcatcagcatactgtcatgacccgccaccgggataacctgcatttcagtaacaacaggcgtcgtaaattgagaactcatatttatgtcctttttcagaatcaatgacggccgaaaacgggacgtttacggtcaaaggtccagccggggatcaggcactgcatcggacctgcgtcgttacgcgcaccgccaggcagacgtttataggcctcatgtgccttttgtacctgttcccagtccagttccacgcccagaccgggcgcatcaggaacggcaatttttccgtttttaatctccagcggattttgggtcaggcgacaatcgccctcctgccaaatccagtgggtatcgatagcggtaggattacccggtgccgccgcgcccacatgggtaaacatcgccagagagatatcgaaatggttattagaatggcagccccaggtcagcccccagtcgtcgcaaagctgcgccacacggactgcaccggaaagcgtccagaagtgcggatcggcaagtggaatatctaccgcattgagcatcaccgcatgacccatttcgcgccagttggtggcgatcatgttagtcgcgacgggcaagccggtcgcccgtcgaaattccgccatcacttcacgtccggagaagccctgttctgcgccgcatggatcttcggcataggtaagaacatcattcagccctttgcataaagaaatggcttcatcaagcagccatgcaccgttgggatcaacggtaatccgcgcatccgggaagcgtttcttcaatgcacgaacagtgtcgatttcttgctcgccaggtaacacgccgcccttaagtttgaaatctttaaagccgtagcgatcctgactggcttccgccagacgcacaacggcttcgctgttcattgctttctgatgccgcaactgataccactcatggttgcccggcgtattttccacataaggaagatcggttttggtccgatcaccgatataaaacagataaccgaggacggtaatagcctcgcgttgcttgcctggccctaacagttcgcagaccggaacattcagcgccttacctagcaggtcaagcaaagcggcttccagcgccgccacggcgttaacgcgtaattcaaaggtccaggcacctttaccgaaggtatcaaaatcggcggcctgattacctttatgcacctgctggaccactttattcagtcgcgcaacttcctggcccagaaccatcggaatagcatcgacaagcgtctgataaatcacatctccgcccggcgcttcaccaatgccggtatgcccggcgttatcggtgagtaccacaatattgcgggtgaaatatgcgttatgtgccccaccaatattaagcaacatgctgtcatgcccggccaccggaatgactttcatatcagtaataacaggactggattgtgtcgccatcttattgccccgcaacaggtttcaactcgatacgcttgatatcgcccaccagcaccaggtagctcagtaccgcgattaaggcatgaacaccaacataaatcagcgccccattaaagctgccagtcgtgccaacgatataaccaattgcgattggcgtgacgatgccagaaatgttaccgaacatgttgaacaggccaccggaaagaccgctgatctcttttggcgcggtatctgccattactgcccaacccagcgccccgatgcccttaccgaagaaggccagcgccataaagccgatgatcatccactcaacgttgacgtagttgcagaacaccatcaccatgctcagcaacatgcccattacgatcggtgttttacgcgcaatgttcaggcttcccgtgcggcgcatcagccagtcggaaataatcccacccagcacaccgccgataaaaccgcaaaccgccggaacggaagccacaaagcccgctttcagaatgctcatcccgcgtgcctgcaccagataaaccgggaaccaggtaataaagaagtaagtcagggcgttgatacagtactgaccgatataaacgccgatcatcatccgactccctagcagctgtttgatctgcccccacttcacgctgaacggcactttaactttggtgttttgctgatccatattgatcagcgcaccacccgcggcgatgtactccagctctttcttatttacccccggatgttgatttggctcgtggatgactttcaaccagataaagctgatgacaatccccagaccgcccataaagaagaagacgtgactccagcccacttcatgcgtcagccagcccataatcggcgcgaagatcaccgttgcgaagtattgagcggagttaaaaatgctcaccgccgttcccctttcctgcgccggaaaccaggccgcaacaatgcgactgttgccggggaaagatggcgcttcagcaagcccgaccaggaagcgcagcgtaaacagggcaacgataatgccgaatccactaaagatatcgacgaagccttgcagcaaggtaaacatgctccagataaagatgctccagaagtagacgcgtttactaccaaaacggtccagcaaccagccaccagggatctgcccgataacataagcccaactgaaagcagagaacacatagcccattcccacgggatcaaggccgatatctttggccatttcgctaccggcgatagagagcgtagcgcggtcgccgtagttgaaggatgtgacgataaacaacatcaccactatccagtaacgagcatttgtgcgtttttccacactgctcgcagcctgacttaaagaactcattgttgcactcctgaaaattcgcgttagccacgctcactctggactgcgacatcgccaggaaatcagaggtgacgtagggtgttttttgccgtttttataggtcgttcgccgaatacggcgcgtgtttatatctggcaatagcagtataaaaagcgcgccatagcggctcaccgtgcaacaacacaacattaatgcgttcaatgaggcccgattttggcattagccctggacggtggaatccacttcacggaaatgaaaacaagaacaagaaaggaagggttaaaacgaagaaataaagaagagtatgaaatggatcgcttgactccaggcaaacgccagtaaaaatccgcgctatgaagcagtttttactggcatttgcctgaaaagattcgattcagcaccgctaaaacgacatttaccgctcgctgaacatatcaggacaacagcgtgccccactgttcgacccacggattactttccgtttccggttccgggttctcactggcgtcaatcaacagcatttcgccaacccgctgagcgctctgttcctgcaacaaggcatcgaactgtttgccgccattgcagaaattcacataactactgtcgccgagcgcaatcacgccataacgcagattcggctggaagcccagactatctttgattccctgaaagagtggcacaatgctatcaggaaggtcgccctgcccggtcgtggacgtaaccaccagaacatacttatcctgatagggcagccagtcgcttaattcaggatcttcaaataccgttgctttgtggccctgcgcggtcagaatcgcttccgcttcttcggccactaacagactattcccgtacatggtgccgacaaaaataccaatttccgccataccgttttctccctggattaggaacttatctctccatcctgaccgcttggcgcactgaactcaaccctttcattttcaggaagcagaccgcgccagccaaattgacttaacgcctgcatccaggtgtcgtccaggcccgcgtgaatagtcagcggctcgccagtaaaaggatgcgtcaaactcaactgactggcatgtagcattaaccgctggaggccaaaatgctcagcaccgctgcgattctggcgtaaatcgccatgtttgctatcgccaataatcggatgacgcaaatgggcaagatgtcggcgaagctgatgtttgcgtccggttttcggctccagttccaccaggccgtagcgcgtggtcgggtaacgtccggtcgctaccggcatttctacggtcgccagaccgcgataatgcgtcactgctggctgcgggcctttatcttcgcgggcaaatttatcagcgattttgtccagttcttccaccagtggataatccagcaccgcttcttccatcaaccagccgcgcacaatcgcatggtaacgtttctggatttggtgctgttcaaactgttgtgccagcagccgtccggcctcgctggataatcccatcaacaacacaccagaagtgggtcggtccagacgatgagcagtaaaaacatgctggcctatctggtcacgcacggtttgcatgaccactactttctcgtcgcgatccagccagctgcggtgaaccagccagccggagggtttatttaccgcaaccagccattcatcctgatagagtatttccagcattagctcgcatcatccgcaaaaagagcatccagtttttccagctcagccagaataagcgcgcgttgcggatggtccgtcgccagcgccatttcataatagggtgcaacggcaaaagcgcccggtaacggctgtttgttatctaacaaatcgtgcattcgcgggatcagcacccactgcaaccactccagtggttccatggtgtccataaagaacggttgggtactattaaattgatgcggctggggttcatcgtttcgccagtgctgatgttcacgcagtaacgcttcaagcgcctgcaactggagacgaacgcggtcatgagtggtcataaagcaacctcaataagaaaaactgccgcgaaggatagcaggaataaaaaaagggagcactgtattcacagcgctcccggttcgtttcgcagcattccagctacttttgttgctccctgctcatccttgacaacttttcctctggccttgcggccaatcgttcatcctgaactattgcttcctgctcacaccaccccgatgtgatacttcatcctgaagtgtccctggccttcctgacccaccgaatcatcctgaccggttctcattctccatcctggaggtgtcctttaacgcgtcctgcgtcatcctcttcgcttcatccagaagcctttccctgaaacaccatcctggtgtgtcctgcagaagtgtcatcatcctgatgttcacttcgttgtctgactccctgtcgacgaagatagaatcgtctttttcgcgaagtcttacaaggcgcttacagacaatgccttaaggaaaatttcatatgaaagttaagaattaacaatcaacattttgattttaaatgaaaataacgattcttatctttttaagtattcgcttatttcctggcgatctcctacagagtctgtaagagatctctcacaaccagatggggtatttggattacagaagaggcttaagttgattaaggaattccgcaagattactggctaaatgcgtccgtttacgtgttcccagcgtctctttgcacacttcaccggagagattacacacgctgatgacctctaactcttcttccagcgtcgcgataaatagtgtgggcggcagttttagccttttctgagtcaccagatgaccaatcagattttcctgcacccgacggaagtcgtcttcactccaggtttgcagcaatgtcagtttgatatcgccaaactgcgcgtgcatatccccggcaaactgagtcgtataaaaggtatgaattgtgggttgtatcacaatatcaaaagcgcgttcaaccgcgtttacattttgttccccggtaaacggctggggttgccagtatacggcatcttcggtagtactaataatgcacggactaggaacaccgtacagttcctcacttaacggccagcttttatgctcttcatgccacgcatcgcagtagcgtgcagtaaaatctttcagggcttgtgcggtcaaatcgtccactaatttctctcttcacttaaaccagatacacttgtcgtttagtttatctggtttatgacggtgaaacatgtcttcttatgcaaaccatcaggcacttgcgggcctgactcttggaaaaagtaccgattaccgggatacctatgacgccagcctactgcaaggcgttccacgcagcctgaatcgcgacccgctgggtctgaaagcggataacctgccttttcacggtacggatatctggacgctgtatgaactttcctggctgaatgcgaaaggtttgccgcaggtcgctgtcggtcatgttgaacttgattacaccagcgtaaatctgattgagagcaagagttttaagctctatctcaacagttttaaccagacgcgttttaataactgggatgaggtgcgccagacgctggagcgcgacttaagcacttgcgctcagggtaagattagcgtggcgttatatcgtcttgatgaactggaaggccagccgataggtcattttaatggcacttgcattgatgaccaggatatcactatcgataactatgaattcactactgactatctggagaatgccacctgtggtgaaaaagtagtggaagagacgcttgtcagccacctgctgaaaagtaactgcctgatcacccatcaaccagattggggtagcctccaaattcagtatcgtggacgccaaattgacagagaaaaactgctgcgttacctggtcagtttccgtcatcacaacgagttccacgaacagtgcgtggaacgcatctttaatgacctgttacgcttctgccagccagaaaaattgagcgtttacgcacgttatacccgtcgtggcggtctggacattaacccgtggcgcagtaatagcgattttgtcccaagcaccacaagactggttcggcaataaatttttctcaattttgcgtgctggattcacgcagaaggttgtgaaaggtcatcaggcagggctattgtaatcaaagggaatgacgatattcgtcccataaggagtttttcttgattacacatattagcccgcttggctccatggatatgttgagccagctggaagtggatatgcttaaacgcaccgccagcagcgacctctatcaactgtttcgcaactgtagtcttgccgtactgaactccggtagtttgaccgataacagcaaagaattgctgtctcgttttgaaaatttcgatattaacgtcttgcgccgtgaacgcggcgtaaagctggaactgattaatcccccggaagaggcttttgtcgatgggcgaattattcgcgctttgcaggccaacttgttcgcggtcctgcgtgacattctcttcgtttacgggcaaatccataacaccgttcgttttcccaacctgaatctcgacaactccgtccacatcactaacctggtcttttccatcttgcgtaacgctcgcgcgctgcatgtgggtgaagcgccaaatatggtggtctgctggggcggtcacagtattaacgaaaacgagtatttgtatgcccgtcgcgtcggaaaccagctgggcctgcgtgagctgaatatctgcaccggctgtggtccgggagcgatggaagcgccgatgaaaggtgctgcggtcggacacgcgcagcagcgttacaaagacagtcgttttattggtatgacagagccgagcattatcgccgctgaaccgcctaacccgctggtcaacgaattgatcatcatgccagatatcgaaaaacgtctggaagcgtttgtccgtatcgctcacggtatcattatcttccctggcggtgtgggtacggcagaagagttgctctatttgctgggaattttaatgaacccggccaacaaagatcaggttttaccattgatcctcaccggcccgaaagagagcgccgactacttccgcgtactggacgagtttgtcgtgcatacgctgggtgaaaacgcgcgccgccattaccgcatcatcattgatgacgccgctgaagtcgctcgtcagatgaaaaaaagcatgccgctggtgaaagaaaatcgccgtgatacaggcgatgcctacagctttaactggagtatgcgcattgcgccagatttgcaaatgccgtttgagccgtctcacgagaatatggctaatctgaagctttacccggatcaacctgttgaagtgctggctgccgacctgcgccgtgcgttctccggtattgtggcgggtaacgtaaaagaagtcggtattcgcgccattgaagagtttggtccttacaaaatcaacggcgataaagagattatgcgtcgtatggacgacctgctacagggttttgttgcccagcatcgtatgaagttgccaggcagtgcctacatcccttgctacgaaatctgcacgtaatctccgctcccccggtgacgtttgttgccgggttttctcgtttttggtcacttactcatcaactcatttcatttgttatatgaatgtttctcaccaccctcacgcgacaaatatcatcacagttaatatgtcatacaatttatgttgcaacgcaaacgtttccctattttcataaaccgtattttatcgctatgaaaaagaaattatcgccatgattaactaaaagtattgattttttcagttcaacctacatatattgcgcgccccggaagaagtcagatgtcgtttaatgggcaaatattgcccttaaattctcttttacttttgatttacagagtaaagcgttgggataatctatcttccaagtagattattgtatttgagatcaagatcactgatagatacataacttgtgtgtatctttccgccctcaaattattacggcggtaaatgattaagccatcgccgatagacagatttcatttttacggtcaggcaccttcccgggctgaactggctaaaagctgaattatttgcattcctccaggagaaatagatggaaacgactcaaaccagcacgattgcgagcaaagactctcgtagtgcctggcgcaagacagacaccatgtggatgctgggcctttacggcacggcaatcggcgcgggcgtgctgttcctgccaatcaacgccggtgttggcggtatgatcccgctgatcatcatggctatccttgcgttcccgatgacgttttttgctcaccgcggcctgactcgcttcgtactgtctggtaaaaacccgggcgaagacatcaccgaggttgtagaagaacactttggtattggcgcaggtaaactgattaccctgctctacttcttcgctatctacccgatcctgctggtttatagcgtggcaatcaccaataccgttgaaagcttcatgtctcaccagctgggtatgacgccaccgccgcgtgcgattctgagcctgatcctgatcgtgggtatgatgaccatcgttcgcttcggtgagcagatgatcgttaaagcgatgagtattctggtattcccgtttgttggcgtactgatgctgctggctctgtacctgatcccgcagtggaacggcgctgcactggaaacgctgtctctggacactgcatctgcaaccggaaacggtctgtggatgaccctgtggctggcaattccggtaatggtgttcagcttcaaccactctccgatcatctcttctttcgccgttgcgaagcgtgaagagtacggcgatatggcagaacagaaatgcagcaagatcctggcattcgcacacatcatgatggtgctgaccgtaatgttcttcgtcttcagctgtgtactgagcctgactccggcagacctggctgcggctaaagagcagaacatcagcattctgtcttacctggctaaccactttaacgcaccggttatcgcgtggatggctccgattatcgcgattatcgctatcaccaaatccttcctcggtcactacctgggcgcacgtgaaggcttcaacggtatggtgattaaatctctgcgtggtaaaggtaagtctatcgaaatcaacaagctgaaccgtatcactgcgctgttcatgctggtaacgacctggattgttgccaccctgaacccgagcatcctgggtatgattgaaaccctgggcggtccaatcatcgcgatgatcctgttcctgatgccgatgtacgcaattcagaaagtaccggcaatgcgtaagtacagcggtcacatcagcaacgtattcgttgtcgtgatgggtctgattgcaatctccgcaatcttctactctctgttcagctaagtcctttcgcgccgctttcgggcggcgcttcctccgttttaacgcgatgtatttcctatgattagcgtattcgatattttcaaaatcggcattggcccttccagttctcataccgttggaccaatgaaagcgggtaaacaatttaccgacgatctgattgcccgtaacctgcttaaagacgtgacccgcgtggtggttgacgtgtacggcagcctctctctgaccggtaaaggccaccacactgatatcgccattattatgggcctggcgggtaacctgccggataccgtggatatcgattccatccccagttttattcaggatgtgaatactcatggtcgcctgatgctggcaaacggtcagcatgaagtggagttcccggttgatcagtgcatgaacttccacgccgacaacctttctctgcatgaaaacggtatgcgcattaccgcgctggcgggcgataaagtcgtttacagccagacttactactctattggcggtggctttatcgttgatgaagagcattttggccagcaggatagcgcaccggttgaagttccttatccgtacagtagtgcagccgatctgcaaaaacattgtcaggaaaccgggctgagtctctctggcctgatgatgaaaaacgagctggcgctgcacagcaaagaagagctggaacagcacctggcgaacgtctgggaagtcatgcgcggcggtattgagcgcggtatttccaccgaaggcgtgttgcctggcaaactgcgcgttccacgccgtgctgcggcactacgccggatgctggtcagccaggataaaaccaccactgacccgatggcggttgttgactggatcaacatgtttgcactggcagtgaacgaagagaacgctgctggcggtcgcgtggtgactgcgccgactaacggtgcgtgcgggattatcccggcagttctggcgtactacgacaagtttatccgcgaagtgaacgctaacagtctggctcgttacctgctggtagccagcgccattggttctctttataagatgaacgcgagcatttctggtgctgaagtgggttgccagggtgaagttggcgtggcgtgcagtatggcggcggctggtctggcagaactattaggcgcaagcccggcgcaggtgtgcatcgcggcggaaatcgccatggagcacaacctcggtctgacgtgtgacccggtcgccggacaggtacaggtgccatgcatcgagcgtaacgccattgcggcagtaaaagcggtgaacgccgcacgtatggcgctgcgccgtaccagcgagccgcgcgtctgcctcgataaagttatcgaaaccatgtacgaaacaggtaaagatatgaacgccaagtaccgcgaaacctctcgcggcggcctggcaatgaagatcgttgcctgcgattaatcgctctccaaaggcctcgttttgcgaggcctcttcccgatttctcatccagccgtagcctgttccggcatcgaatgttacccttatcgcctgatctttaagggggttatcgtggctgttcatttgcttattgtcgatgcactgaatcttattcgtcgcattcatgccgttcaggggagcccctgtgtcgaaacctgccagcatgcgctcgatcagctcattatgcacagccagccaacccacgcggtcgccgtttttgatgatgaaaaccgcagtagcggctggcgtcatcagcgtttaccagattacaaagcgggtcgaccgccaatgccggaagagttgcacgacgagatgcctgcattacgcgccgcctttgagcaacgcggcgtcccgtgctggagtaccagcggcaacgaagccgatgacttagccgccacgctggcggtcaaagtgacacaggccgggcatcaggcaacgattgttagcacagataaaggctactgtcagttacttagtccgacattacgtattcgtgattacttccagaaacgttggctggatgcgccatttatcgataaagaatttggcgttcaaccgcagcagttgcccgattactggggacttgcggggatcagcagtagtaaggtaccgggtgttgcgggaatcggaccaaaaagcgccacgcagctgctggtcgagtttcagagtctggaagggatatatgagaatctggatgcggttgccgaaaagtggcgcaaaaaattagaaacccataaagagatggcgtttctgtgccgcgatattgcccgcttacaaaccgatttgcatatcgacggcaatttacagcaattgcggttggtacggtaacggcgagccggatacgccgcaaacgtcgtatccggcattatcacatcagcgcatttaccaggcggtatggtaaagctctacaatatcctcaagcgttgcttcacgcgggttgccaccggtacaaacatcatccagtgccgcctgcgccagtgccggaatgtcttccttgcgtacaccaacatcacgcaaatgtggcggaataccgacatcacggttgagagcaaacaccgcttcaacagcggcattacgcgcctcttccaggctcataccttccactttcacgcccataacgcgcgcgatatcgcggtacttctcaccggtaaagtcagcgttataacgcatgacatgcggtaacaggatggcgttcgcaacaccgtgtggagtgttataaaacgcgcccagtggatgcgccataccatgcaccaaccctaacccaacattgctgaagcccatacccgcaacatactgcccgagcgccatttcttctccggcatccttatcaccagcaacgcttcctcgcagcgccccagcaatgatttcaatcgctttaatgtgcagtgcatcggttagcgcccacgcgccacgggtaatatacccctcaatagcatgagtgagcgcatcgacacccgtcgcagctttcagcgctggaggcataccatccatcatgtcagcgtcaataaacgccacctgcgggatatcatgcggatcaacgcaaacaaacttgcgccgtttctcttcgtcagtgatcacgtagttaatggtcacttctgccgcagtacctgctgtggtaggaattgccagaatcggtacactgggtttattggtcggggaaagcccttccaggctacgcacatcggcaaactccgggttgttgctgataatgccaatcgctttacaagtatcctgtggagaaccaccaccaatagcgatcaggtaatccgcgccgctattctggaatacaccgagcccttctttgacgacagtaattgttgggttgggcactacgccgtcgtaaatcgcccatgccagccctgcagcatccatcttatcggtcactttcgccaccacgccgcattgcaccagcgttttatcggtgacgatcagcgccttctgataaccacggcgtttcacctcatcggttaaagccccaacagcaccccgaccaaaccatgccgtttcgttcagaatcattctgttagccatcatccttctccttgttgctttacgaaattactcttcaattcgtaacccataggttttgaatttctccagcactacggcaatctcttcatcgctcagcactggcaccgggtccgtaatcgccagggtcgtcaggtaaagttgcgccagcacttcaacttcatgcgccagccataacgctttttccagattcacctcacaagcgataagcccatgatgttgtaacaaagttgccttacgatttttgagagccagcgcaacatgttcagaaagttcgcgtgttccaaaggtcgcataaggcgcgcaaggaatagaattaccgccagccgccgcaatcatgtagtgaatagcggggatgcttcggttaagaatggaaactgccgtgcaatgaacggcatgattgtgaacaaccgcgttggcatccggtctgctttgataggctgccatatggaaacgccattcgctactggggagctttccttcctcatgtttaccgttgccatcaataaagacaatatggctctccgtcagtttttcatatggaatgcctgtaggcgtaatcagcatcccatcctgataacgtacactgacgttccccgctgtcccctggttcagtcccaggcgggtcatttccaggcaagtgtcaataatctgacgagcaagtttatttcgttccattagctacctctctctgattcaaaacagggcaataatgttgttcctttcacactattgaattagccgtttaattacccaccatcttcttcctgattaacaagaaagaaattcacaagcttatattttgtgacctggttcaactaatcacagtaaataactgcaagttctctttttataaccccattaaaaatgaccgctcttaaaaatatttatcaaaacggtcatttttctattcctccaagcccggaatgaccgttttcggcacaaacaattaatacggtcatctgatttgtgttttttatgatttattttctgaaacgggcatgaaatttcgattattaaagtgatggtagtcacataaagtcaccttctagctaataagtgtgaccgccgtcatattacagagcgttttttatttgaaaatgaatccatgagttcatttcagacaggcaaatattcactgatatgaagcccgaactcgctggttttgcacttttgaaaacataaccgattacgtgcttaagcttctgaacctaagaggatgctatgggaaacacaagtatacaaacgcagagttaccgtgcggtagataaagatgcagggcaaagcagaagttacattattccattcgcgctgctgtgcagtctgttttttctttgggcggtagccaataaccttaacgacattttattacctcaattccagcaggcttttacgctgacaaatttccaggctggcctgatccaaagcgccttttactttggttatttcattatcccaatccctgctgggatattgatgaaaaaactcagttataaagcagggattattaccgggttatttttatatgccttgggtgctgcattattctggcccgccgcagaaataatgaactacaccttgtttttagttggcctatttattattgcagccggattaggttgtctggaaactgccgcaaacccttttgttacggtattagggccggaaagtagtggtcacttccgcttaaatcttgcgcaaacatttaacagctttggcgcaattatcgcggttgtctttgggcaaagtcttattttgtctaacgtgccacatcaaagccaagacattctcgataaaatgtctccagagcaattgagtgcgtataaacacagcctggtattaagcgtacagacaccttatatgatcatcgtggctatcgtgttactggtcgccctgctgatcatgctgacgaaattcccggcattgcagagtgataatcacagtgacgccaaacaaggaagcttctccgcaagcctttctcgcctggcgcgtattcgccactggcgctgggcggtattagcgcaattctgctatgtcggcgcacaaacggcctgctggagctatttgattcgctacgctgtagaagaaattccaggtatgactgcaggctttgccgctaactatttaaccggaaccatggtgtgcttctttattggtcgtttcaccggtacctggctcatcagtcgcttcgcaccacacaaagtcctggccgcctacgcattaatcgctatggcactgtgcctgatcagtgccttcgctggcggtcatgtgggcttaatagccctgactttatgcagcgcctttatgagcattcagtacccaacaatcttcagcctgggcattaagaatctcggccaggacaccaaatatggtagctccttcatcgttatgaccattattggcggcggtattgtcactccggtcatgggttttgtcagtgacgcggcgggcaacatccccactgctgaactgatccccgcactctgcttcgcggtcatctttatctttgcccgtttccgttctcaaacggcaactaactgaacatattttccgaataaagtgaggaatctgtaatgaaaaaaatcagcttaccgaaaattggtatccgcccggttattgacggtcgtcgcatgggtgttcgtgagagccttgaagaacaaacaatgaatatggcgaaagctacggccgcactgctgaccgagaaactgcgccatgcctgcggagctgccgtcgagtgtgtcatttccgatacctgtatcgcgggtatggctgaagccgctgcttgcgaagaaaaattcagcagtcagaatgtaggcctcaccattacggtaacgccttgctggtgctatggcagtgaaaccatcgacatggatccaacccgcccgaaggccatttggggctttaacggcactgaacgccccggcgctgtttacctggcagcggctctggcagctcacagccagaaaggcatcccagcattctccatttacggtcatgacgttcaggatgccgatgacacaagcattcctgccgatgttgaagaaaaactgctgcgctttgcccgcgccggtttggccgtcgccagcatgaaaggtaaaagctatctgagcctgggcggcgttagcatgggtatcgccggttccattgttgatcacaacttctttgaatcctggctgggaatgaaagtccaggcggtggatatgaccgaactgcgtcgccgtatcgatcagaagatttacgacgaagccgaattggaaatggcactggcctgggctgataaaaacttccgctatggcgaagatgaaaataacaaacagtatcaacgtaatgccgagcaaagccgcgcagttctgcgcgaaagtttactgatggcgatgtgtatccgcgacatgatgcaaggcaacagcaaactggccgatattggtcgcgtggaagaaagtcttggctacaacgccatcgctgcgggcttccaggggcaacgtcactggaccgatcaatatcccaatggtgacaccgccgaagcgatcctcaacagtagttttgactggaatggcgtgcgcgaaccctttgtcgtggcgaccgaaaacgacagtcttaacggcgtggcaatgctaatgggtcaccagctcaccggcaccgctcaggtatttgccgatgtgcgtacctactggagtccagaagcaattgagcgtgtaacggggcataaactggatggactggcagaacacggcatcatccatttgatcaactccggttctgctgcgctggacggttcctgtaaacaacgcgacagcgaaggtaacccgacgatgaagccacactgggaaatctctcagcaagaggctgacgcttgcctcgccgctaccgaatggtgcccggcgatccacgaatacttccgtggcggcggttactcttcccgcttccttaccgaaggcggcgtcccgttcaccatgactcgtgtcaacatcatcaaaggcctgggaccggtactgcaaatcgcggaaggctggagcgtggaattgccgaaggatgtgcatgacatcctcaacaaacgcaccaacagtacctggccaaccacctggtttgcaccgcgcctcaccggtaaagggccgtttacggatgtgtacagcgtaatggcgaactggggcgctaaccatggggttctgaccatcggccacgttggcgcagactttatcactctcgcctccatgctgcgtatcccggtatgtatgcacaacgttgaagagaccaaagtgtatcgtccttctgcctgggctgcgcacggcatggatattgaaggccaggattaccgcgcttgccagaactacggtccgttgtacaagcgttaatacattactccctgatgtgatgcccggtcgctccggctaccgggcctgaacaagcaagagtggttagccggataagcaatgttatccggctatattgcaggagcgattatgaaacaagaagttatcctggtactcgactgtggcgcgaccaatgtcagggccatcgcggttaatcggcagggcaaaattgttgcccgcgccagtacgcctaatgccagcgatatcgcgatggaaaacaacacctggcaccagtggtctttagacgccattttgcaacgctttgctgattgctgtcggcaaatcaatagtgaactgactgaatgccacatccgcggtatcgccgtcaccacctttggtgtggatggcgctctggtagataagcaaggcaatctgctctatccgattattagctggaaatgtccgcgaacagcagcggttatggacaatattgaacggttaatctccgcacagcggttgcaggctatttctggcgtcggagcctttagtttcaatacgttatataagttggtgtggttgaaagaaaatcatccacaactgctggaacgcgcgcacgcctggctctttattagcagcctgattaaccaccgtttaaccggcgaattcactactgatatcacgatggccggaaccagccagatgctggatatccagcaacgcgatttcagtccgcaaattttacaagccaccggtattccacgccgactcttccctcgtctggtggaagcgggtgaacagattggtacgctacagaacagcgccgcagcaatgctcggcttacccgttggcataccggtgatttccgcaggtcacgatacccagttcgccctttttggcgctggtgctgaacaaaatgaacccgtgctctcttccggtacatgggaaattttaatggttcgcagcgcccaggttgatactagcctgttaagtcagtacgccggttccacctgcgaactggatagccaggcagggttgtataacccaggtatgcaatggctggcatccggcgtgctggaatgggtgagaaaactgttctggacggctgaaacaccctggcaaatgttgattgaagaagctcgtctgatcgcgcctggcgcggatggcgtaaaaatgcagtgtgatttattgagctgtcagaacgctggctggcaaggagtgacgcttaataccacgcgggggcatttctatcgcgcggcgctggaagggttaactgcgcaattacagcgcaatctacagatgctggaaaaaatcgggcactttaaggcctctgaattattgttagtcggtggaggaagtcgcaacacattgtggaatcagattaaagccaatatgcttgatattccggtaaaagttctcgacgacgccgaaacgaccgtcgcaggagctgcgctgttcggttggtatggcgtaggggaatttaacagcccggaagaagcccgcgcacagattcattatcagtaccgttatttctacccgcaaactgaacctgaatttatagaggaagtgtgaaatgctgaaaacaattagcccgttaatttctcccgaactattgaaagtgctggcagagatgggacatggagatgaaattattttttccgatgctcactttcccgcccatagcatgggaccgcaggtgatccgcgctgatggcctgttggtgagcgacttgctccaggcgattatcccgttatttgaactggacagttatgcaccgccgctggtgatgatggcggcggtagaaggtgacactctcgatcctgaagtagaacgacgttaccgtaatgcgcttagtctacaagccccgtgtcctgacatcatccgcatcaatcgttttgcgttttatgaacgggcgcaaaaagcctttgcgatcgttatcacaggcgaacgagcgaagtacgggaatattcttttaaaaaaaggggtaacaccgtaatctcataccggtacgcccgcatgacgcgggcggttatcgaatgatggggtgaaaaatatgaaagcggcacgccagcaagcgatagtcgacctgctgctgaaccataccagcctgaccacggaagctctctctgaacagctaaaggtcagtaaagaaaccattcgtcgcgatctcaatgaattacagacgcagggtaaaattctgcgcaatcatggacgcgctaaatatatccaccgtcaaaatcaagacagtggcgatccctttcacatcaggctgaaaagccattatgcgcataaagcagatatcgcgcgcgaggcgctcgcgtggattgaagaagggatggtgatagccttagacgccagtagtacttgctggtatctggcacgccagttgcctgacatcaacattcaggtcttcaccaatagccatccgatttgccatgaactcggtaaacgcgaacgcattcaactgatcagttccggcggcacacttgagcgcaaatatggctgttacgtcaatcccagcctgatttcccaacttaaaagcctggaaatcgatctgtttattttttcttgtgaagggatcgatagcagcggcgcactgtgggactccaatgcgatcaacgctgattacaaaagcatgctattaaaacgtgccgcgcaaagcttgttattgattgataaaagtaaatttaatcgtagtggggaagcccgcatcgggcatctggatgaggtaacgcacattatttctgatgagcgccaggttgcaacttctttggtaacagcctgacggaaagggtagcaggccggagacgacgccccggccttgcctgttatcgctcgtcgcgacgaccacccaccgcagcccagatgcggcggacgtgcaccgtcacttcttcgcgatcgtgatacaactgccgcgcctgaatctgagcatttatgccatgttcatcaagctgtgcctgaatatacgccagattgtgactcacttcttcgtagcgttttttcatcggcagtttgaggttgaaaatggtttcacggcaccagccattaaccagccactgtgccatcaatgccgcaactttcgccggtttttcaaccatatcgcataccatccaggagatattgctgcgcgtcggacggaatttgaaaccgtcttcccgcagccacgtcacctgtccggtatccatcagactttgcgccatcgggccgttgtcgacggaataaacccacatgttgcgcttcaccagttggtaggtccagccgccagggcaagcgcctaaatccaccgcccacatcccgttcgccaggcgttcatcccactcatccgcaggaataaacacatgaaatgcctcttccagtttgagcgtggaacgactcggcgcatctgccggaaatttcaggcgcggaatgcccatatagaacgggctattattgttgctgtaactgtaaccggtatagcagcagcctggtgcaataaagaatacatgcacaaccggacgcttcggcgtttcatagttcgccagcaccccggcatcgcgcaaggcagcgcgtagcggaacagtaaatttacggcagaatttcagtaactctttgctttcgttggtatcggcaacttcaacacgcagttcaccgcccttctctactacgccctgtaacatgccgacaatgggggtaatacgatcttctggcggcaaatgctgcaggagttcccccaccacaaaccactggcgggcaaaaattaaactactgaacggcagctcacggattaacttatcgccatcatcaggttgataacattcataaatgacataacccgcattctctttcacgcgggcaaaaccgaaaatttcccgctggccggctttatcggtaatttctgcggcgcactctttttcaaagcccggacggcacagcaatacaaccttattcatgacttacgcccttgcgctttaaacggatagcaccaactaacattaacgcccagcccgcgaggaagctcacgccgccaaccggagtgacaaacgcccacaaacgcagatgggacagcgccaggcaataaaggctgccgctgaacaacaccgtgcctaacgcgaggaaaacgctactccagtaaaaccagatactgatgcgacgctgcattgccaccgccagacctaagatcgccagcgtatgaaacgcctggtattcgaggccggtctggatccagcccatctcaacggcccccatggttttacttaacacatgcgcgccaaaagcgcccagagccacaaaaatgaagccgctaatggcggcgaaaatcagcataaaacggctggtcatggtcgtaccctacgtaaattattgttcataacgaaagcggaatttttcttgttcagcagcggctttcgccaggatccattggcgaaaggcggctattttacccagttctgcctgactgtcatgacaaaccagataaaaagcatttttactgaccagaacatcattaaacgggcaaacaagacgtccggcctcgatttcagattgcgccatcacgttatttgccagcgccactccctgcccgtggatagccgcttgcagcaccatggcgctatggctaaaaattggcccttgctgaacgttgatatgatttaaccccaactgtcgggtatatgtctgccagtcacggcggctagcatcatgtaataacgtatgtttagccagatcttccggtgtcttcaagggtttttcgccagtcagcagtagcgggctacacaccggcaataaatattcggcgtacagtttttccacccgtagccccggccagttgccccgaccataaaatatcgccacatcaacatcatccgccagcttatcttcctgacgatcaaccgcctggattcgaacgtcaattcccggataagcactattaaagctggaaagtcgcggaaccaaccaatgaatggcgaaactggggagtaaactgaccgtcaacgcccccttggcgctacgggcctggagtttacgcgtcgcttcggttaattggctaaatatctctttgatatcgaggaaatagctttgcccttcctcggtcagcaggagactacgattacggcggcggaacagttttagccccaaaaaatcctcaagagacttgatttgatgacttactgcggcttgggtcacaaaaagctcttctgctgcgcgagtgaaacttaaatggcgtgctgcggcatcaaaaactcgtaaggcatttagcggtggtaatcgtttagacatggctattaaactttgatgttaaatgaatttaacaattagatcacactatgtaacctattagtttttttaatctgagccattataaattgtccgttgagcttctaccagcaaatacctatagtggcggcacttcctgagccggaacgaaaagttttatcggaatgcgtgttctggtgaacttttggcttacggttgtgatgttgtgttgttgtgtttgcaattggtctgcgattcagaccatggtagcaaagctaccttttttcacttcctgtacatttaccctgtctgtccatagtgattaatgtagcaccgcctaattgcggtgcttttttttaccttgcgatcgcgaattactgatccagttcgaccatctctttcacgtcagtacggttgatctgctgtttgttgccattagcgtctttatagctaatcataccggtatcgttatcagtctgtggtttgccgtcagagacgatggtacgtccgtcattggtgtgcatcacatagttgctaccggaacaggcgctcagggcaaaagtcagcatacaggcagaaataattgcggcagtctttttcatcatcttctccttaaagcgattaataaatcttaatagtattgattaacaggctaaaattaacgcctaacactattcagcatatgttacttacgcggcttcgccaggatatccagataattctgatggttagcactctccttgtatcaaagtgaattttgcgtcacgatcggtgcatcaagccgaggagtaccatgaacgtttttaatcccgcgcagtttcgcgcccagtttcccgcactacaggatgcgggcgtctatctcgacagcgccgcgaccgcgcttaaacctgaagccgtggttgaagccacccaacagttttacagtctgagcgccggaaacgtccatcgcagccagtttgccgaagcccaacgcctgaccgcgcgttatgaagctgcacgagagaaagtggcgcaattactgaatgcaccggatgataaaactatcgtctggacgcgcggcaccactgaatccatcaacatggtggcacaatgctatgcgcgtccgcgtctgcaaccgggcgatgagattattgtcagcgtggcagaacaccacgccaacctcgtcccctggctgatggtcgcccaacaaactggagccaaagtggtgaaattgccgcttaatgcgcagcgactgccggatgtcgatttgttgccagaactgattactccccgtagtcggattctggcgttgggtcagatgagcaacgttactggcggttgcccggatctggcgcgagcgattacctttgctcatagtgccgggatggtggtgatggttgatggtgctcagggggcagtgcatttccccgcggatgttcagcaactggatattgatttctatgcttttagtggtcacaaactgtatggcccgacaggtatcggcgtgctgtatggtaaaagtgaactgctggaggcgatgagcccctggctgggcggcggcaaaatggttcacgaagtgagttttgacggcttcacgactcaatctgcgccgtggaaactggaagctggaacgccaaatgtcgctggtgtcataggattaagcgcggcgctggaatggctggcagattacgatatcaaccaggccgaaagctggagccgtagcttagcaacgctggcggaagatgcgctggcgaaacgtcccggctttcgtagtttccgctgccaggattccagcctgctggcctttgattttgctggcgttcatcatagcgatatggtgacgctgctggcggagtacggtattgccctgcgggccgggcagcattgcgctcagccgctactggcagaattaggcgtaaccggcacactgcgcgcctcttttgcgccatataatacaaagagtgatgtggatgcgctggtgaatgccgttgaccgcgcgctggaattattggtggattaatgacaaacccgcaattcgccggacatccgttcggcacaaccgtaaccgcagaaacgttacgcaataccttcgcaccgttgacgcaatgggaagataaatatcgccagttgatcatgctggggaaacagcttccggcattgccagacgagttaaaagcgcaggctaaagagattgccggatgcgaaaaccgcgtctggctgggatatacagtggctgaaaacggcaaaatgcatttctttggcgacagcgaagggcgcattgtgcgcggcctgctggcggtgttgttgactgccgttgaggggaaaaccgccgccgagttgcaggcacagagtccactggcattgtttgatgagctgggattacgtgcgcagcttagcgccagtcgcagccaggggttaaatgcgttaagcgaggcgattatcgctgcgacgaagcaggtttaagcacagaaccgggtcggataagacgttcgcgtctcatccgacctgattgtttaaccctgacgcgccgctttcgccatcatcttcttcagcgcatgagaaaccgcaacaaacccaaaggtggcggtcaccatcgttgccgcgccaaatccagatgcacaatccatccgcttcggcccttctgccgtggctttcatcgcacacaccgtaccgtcactctgcgggtacaccagcgcttcagtagaaaacacgcaatccacgccgagcttacctttactgtttttcactacgccaaaatcgcttttcaggcgctcgcgcaacttcgccgccagcgggtcctgaatcgttttcgccagatcggtaacctgaatctgcgtcggatcaatctgcccacccgcgccaccggttgtgaccagtgggattttattgcgccgacaataagcaatcagcgccgctttgggccgtacactatcaatggcatcaatcacgtagctataacccacgctcatatactgcgctacgttatccggcgtcacgaaatcatccaccaccgttacacggcactccgggttaatctggcgaatacgctccgccataacttccgcttttgccagcccaacgttatcgcgcagggcatgaatttgccgattggtattggtgacgcacacatcatccatatcgataagcgtgattgcgccaatccccgtgcgcgccagcgcttccgccgcccaggaaccgacaccaccgataccaaccacacaaatatgcgcgtcagcaaacagttgcaacgctttttcaccatacagacgcgctgtgccaccaaaacgctgacgccatgcatcactaattaccacagacatagcacctcagaattaaaaagggcgaggttatccctcaccctaaacgcataaatgcctgatgcgctacgcttatcaggcctacataactcctgcaatattttggatttgcatgatttgtaggccggataaggcgttcacgccgcatccggcatgaacaacgcgcacttagtcaataatcaggatgtgaggttacccctcaccctgtcatatccgtaaaaacggcatacagaatatcacatcagccgctaaagacgttacctgcgcccggggcggttttcagcacccagacacgtccatagtggttgtaccaacctgcgcggtgtccggcttccggcccgatcccttgatagatatcgaagtgttggcctttgattgcaccaccgacatccagcgccaccatcagacgcagttcgtactgaccattaaatttgccgttattatccagcaacggcacttctgccagcaaggtagtacctggcggaataatggaacgatcagaggcaacactcgcgcgaccaaccagcggcaccgcacttgcccctttcaccggagcaaaagattgcggtttaaagaagacgaaagacgggttctgttccagcagctcgcgaacctcggcttcactgtgtgtttcgccccagtgacgaatcgcctgcatgctcatatcttcttttttcacttcgccacggtcgatcagcaccttaccaatgctgcgataggcatgaccgtttttccctgcatagctgaaaaagttaagcggactgccatcaccaaagtcgatatacccactaccctgcacatccataatgaagttatccatcagggagttactgtaagcgagaatatatttatcactcaatgcccccgcgtagatctccgcacgagacggcagacgaccacgttttggcggcatacggtaaataggatactggaactcgccctggcgggtatggcgcgcctgaattaccggcgtgtaataaccggtaaactgcacgttaccatagttgtcggcaccttccatctgccaggcatcaatgccgaactggcgcatattgcgggtatcaccgcctgcgcgcagccactcttgcaccgcgttataaacattactctggttgccatacagacgcggactgctattacggatatggttaatttgctcggcaaaatcaccggcgttaatcggcgcgccaacggcatctggctggttcaccagagagaaaggctgggtaaatttcccgtctttatattgctgtccgcgatcggttggtttggaagagcaggcggcaagcattgccacaaccgtgcccataagaaggtactttacccaacgtcctttcattgttctcttcttcaggttaaaaaataaggcgcaacgaagataacaaaccgccgcgtttaatgaaatgagcagcctctccctgacgcaaattttgcacaaaaaataggctttagtgatttgtttttgttcaaaatcatgccaaatccgtgatcggggtaaaaaaaaggttgcatgaaaacgcgagcggagtatagtgcgcatccacggacgcggggtggagcagcctggtagctcgtcgggctcataacccgaaggtcgtcggttcaaatccggcccccgcaaccaattaaaatttgatgaagtaaagcagtacggtgacgcggggtggagcagcctggtagctcgtcgggctcataacccgaaggtcgtcggttcaaatccggcccccgcaaccaatcaaatttgatgaagtaaaagcagtacggtgacgcggggtggagcagcctggtagctcgtcgggctcataacccgaaggtcgtcggttcaaatccggcccccgcaaccaattattgaacaccctaacgggtgtttttttgtttctggtctcccataaaaaagcgccattcagcgcctttttatcatccccttctcgccagcgtcgccccatcggcaaaatacgctttaatccccgcaagaatagactccgcaacttcctgctggaaagtcgccgttttcagtttacgctcttcctcaacgttactgataaacgccgtttcgaccagaatggagggaatatctggtgcctttagtacggcaaacccggcctgttcaacttgatttttatgcagcttattgattttaccgagcttattcagtaccgctttaccaaacttcaggctgtcggcaatggtcaggctctgtaccatatcgaacatggtgtggtcgacatagcggtcaccgcttttgctcacgccaccaatcaagtcgctggcgttctgggtttgtgccagatattttgccgcagtactggttgcacctttggtactgagcgcaaacacagaggaaccgctcggctgacgactggtaaaggcgtcggcatggatagagacaaacaggtcagcacgctgtttctgggcttttgctacgcgcacttgcaatggaatgaagatgtcttcattgcgcgtcatgtacaccttcatattgccctctttctcgatcagagagcgcaaacggcgagctatttgcaataccacatctttttcgcgcgttttgtatttccccaccgcaccggagtcttcgccaccgtggccagggtcaagcataatgacaatcggacgatcgcgccctgctttacccggttgtggaccactttgcgctggcggcacctgcttttcgaggtcgcctttgttgtaatcctccagcagcgccagcagcgggtcctgcatatcctgtgcattggccggatagaggtccatcaccagacgctctttaaacccggcgaccggcgcaagggcaaacagctgcggttttacgttttgctttaattcaaaaaccatccgtacggtttgcgggtcaaattgcccgacgcgcgcgctcttgatgaacgggtcgtctgcacgaatttgtgccgccatccccttgagtacgctgttcaggtttacatcttcgatatccaccaccacgcgttcagggttactcaacgcgaactgcttatatttcagctgacgattactttccaccgtcacgcgggtgtagctggacgcaggccagacgcgcaccgccacgacctggctgaccgcagccagactgacctgacttacgctcaatagccacatggcacccgcgccttgcagtaaacgacgacggctgattgcagtgttggatccactcatgcctctcccgagcaaaagaaatctaagctgtgtaacaagtaaacgactaatttgaccggaaactttagcgaaagacgcataatctgtcatctaataaacggtaaacattctttttatattcacggcattactgataaaaaagtcgctctcgcataaaatttacacttgcaccctgcgaaaaaacagaataaaaatacactaatttcgaataatcatgcaaagaggtgtgccgtggtaaaggaacgtaaaaccgagttggtcgagggattccgccatagcgttccctatatcaatacccaccggggaaaaacgtttgtcatcatgctcggcggtgaagccattgagcatgagaatttctccagtatcgttaatgatatcgggttgttgcacagcctcggcatccgtctggtggtggtctatggcgcacgtccgcagatcgacgcaaatctggctgcgcatcaccacgaaccgctgtatcacaagaatatacgtgtgaccgacgccaaaacactggaactggtgaagcaggctgcgggaacattgcaactggatattactgctcgcctgagcatgagtctcaataacacgccgctgcagggcgcgcatatcaacgtcgtcagtggcaattttattattgcccagccgctgggcgtcgatgacggcgtggattactgccatagcgggcgtatccggcggattgatgaagacgcgatccatcgtcaactggacagcggtgcaatagtgctaatggggccggtcgctgttagtgtcactggcgagagctttaacctgaccagcgaagagattgccactcaactggccatcaaactgaaagctgaaaagatgattggtttttgctcttcccagggcgtcactaatgacgacggtgatattgtctccgaacttttccctaacgaagcgcaagcgcgggtagaagcccaggaagagaaaggcgattacaactccggtacggtgcgctttttgcgtggcgcagtgaaagcctgccgcagcggcgtgcgtcgctgtcatttaatcagttatcaggaagatggcgcgctgttgcaagagttgttcagtcgcgacggtatcggtacgcagattgtgatggaaagcgccgagcagattcgtcgcgcaacaatcaacgatattggcggtattctggagttgattcgcccactggagcagcaaggtattctggtacgccgttctcgcgagcagctggagatggaaatcgacaaattcaccattattcagcgcgataacacgactattgcctgcgccgcgctctatccgttcccggaagagaagattggggaaatggcctgtgtggcagttcacccggattaccgcagtagtagtaggggtgaagttctgctggaacgcattgccgctcaggcgaagcagagcggcttaagcaaattgtttgtgctgaccacgcgcagtattcactggttccaggaacgtggatttaccccagtggatattgatttactgcccgagagcaaaaagcagttgtacaactaccagcgtaaatccaaagtgttgatggcggatttagggtaagcgatgaaaatcgtcggatgcgacatgcgtaacactcgtacgtcgcatccggcaattacgtttattcccgactactaaacaacgccgccagaccactgcgccgctcagtacgagtggcgattgccgcacttaatatgcgctcatcggcatacaggctcagacggcgacgcgcgcgggtcaccgcggtataaaccagctctcgcgttactaccggcgtgcgttggctcggcaaaatcaacgccgcatggtcgaactcgcttccctggcttttatgtaccgtcatcgcccacgtagtttcgtgctctggcaagcgactcggttgcacagacttaatattgccgtccggcatcgcaaaccagacgcgcgtcccctgcccgcgatccagcgcaataccgatatcgccattaaacaacccaagcgcgctgtcattacgggcaatcatcaccggtcgaccttcgtaccaacgagagtgcggatgacgatgaattttgcgcttctgttgcataaactgctcaattcgctcattcagtccagccacgccaaacggcccttcccgcagggcgcacaaaagctggtactcattgaacgcctgaatgattaaatccggctcggcacgcgcttgcagcagatccagataacgtccgtaacccgcaagagcttcctcaagcatcgcaatataatcttcgccgctctgtaaaagccgtttttcgatatcagtaaaatcctgctgaaaaacggttttcactgccgttttatcaccacggttgatcgccgcagctaactgaccaatgccagaatcgctgccgaaacgatagcttttttgcagcaggcagagactgtcgcgcaaagatgccgcttctgtgccggttcctgccggaacgtgagtccccgtcaggcggcttagctgcctggcacgctcggcggtaaagcccgcgttggcataagcgcagatatcgcccagcacagccccagcctcaacgctggccagttgatcacgatcgccgagaaagatcactcgcgcatgatcgggcaaggcgtcgatcagtctgctcatcataggcagatcgatcatactcgcttcatctaccaccagcacatcaagatgcagcgggttaccggcatgatgacgtaaacgctggctacccggctgcgcgcccagcaatcggtgcaaagtgctggtatcttccggaatgcgtttcttttgttcatcggtcagcggtaactgtcgcaaagccttgccgagagattcggttaagcgcgcggcagctttacccgttggtgcagccagacggatacggcagcgttcgccgtcggccatttgaattaacgctgccagcaacttcgctacggtggtcgttttaccggtgccagggccgccggaaatcacgctgatccgccgcgtcagcgccactgccgccgcaactttttgccagttaatttcatcgcttactggaaaaagtttgtccagggtttgcgccagtagagcttcatcaacctcaatggcatgattcacttcgttgaaaaagcgtgccactgtgcgctcgttacaccacatgcgattcaaataaagacgatcgccacagaggatcatcggcgtgggttcatctcccctgctgaccgcttgagaagccagcaagcattcttcccaattttgtagctcaccgatttcactgacacaggtcgccaacagcggatggctcgcctcgttattttccagtcgactaagcggcaaacaaacgtgtccctctccggcatcatgacttaacagtgccgccgcgagggtgacggcaggatgttcatctcccgccacggtcagggcaaattgcacatccagcgggcgtagctgtttgtgctccacagcttccagtaattgcttttgcaatttcattacgcctcctccagggtcataccggcaaacatctcatccatcagggcaatcaacccggcgttgggtcgggttgtgtaaatcccctgttgcggatgttctttatcaacgccacgcaggaacagataaataacgccgccaaagtggtgctcatagtcgtaatcagcaatgcgatggcgcagataacgatgcagcgccagggtataaagctgatattgcagatcatagcggtgtgcctgcattgccgctgccatagcctgttgggtgtaagcgctactgtcttcacccaaccagttggatttatagtcgagcaggtaataacgcccttcgtggcggaacaccaggtcgataaagccttttaacatgccacgtacctgcatgaactccagcggcgggcagcctgcggatagcgggtcaaactggcggattaacgtatcaagctgactggcgataagcggttcactaatcggcagataaaactccatctccacctgtttattgcgggcggaaagttgactcaggcttacgccggtttcattgagaggtgcctggaggacagccgtgatccactcggtcaataccggttcccactggctttcaaagccgccgagttccagtttttcccgcacccagttcgggtcaaccggctgggtaaaatccaggtcttcaaacaaactgtgcaagaacgtccccggactcgcaccgcgcggaaactgatgtggtgttaacgtcggttcttcaacgacgctggcaacgcctgcagcatcgacatccagccgaggcatcaaatcctgggcgataccgtgaccacgctgttgcaaaccagagtagctggtgacgcgccagttatcgccgggcaatcgttgtaacgtcttcgcattcagctctgctgtagaaacatcattaacctgccagggttggttatcaccagtttgtgccgtttgccaggcaatatcatcatcgcataacgcttcaatacaggtgcgaagccctgccgcatcttgcggttcccctttttgcagcaaacgcccgagcgcactttggtggacgtcggtgtcaccttttttatcgccacgacggcgcaccagcggtgcaacgccgagactgcaatgccaaacgctacgtgtcagcgccacgtaaagcaaacgcagatcttccgccagacgttcggcctccgcgaggtcgacgctttctggcgcagcattaagatccagaactgcctcaaagctgtggcgatcgtgataaaacgcctgctcctggacgcggaaattggtgataaacggcagccagaccaatggatattccagccctttgcttttgtggatcgtgacaatctgcaccagatgtttatcactttcgagacgcatttgttggctggaggcattactgtctggctcgaggatatgttggcttaaccagcgtaccagcgcatgttcactttccagctgcgttccggcttcttgtagcagttcgctgatatgcaagatatcggtaagacgccgctcaccgcctgccgttgccagcaagttttcagcaatgttacgcgcgctcatcagcgcccgcagcatcggcataacgccacgtttgcgccagatttgccgataaccatcgaactcttcgactaccacatcccacgcatgttcgtcattgttcagcgtttcgatatccagcgcgttcagccccatcatactcgttgccagcgcactacgcagggtgttctcacgttcgggcgtcatcaccgcctgcaacaaccaaagcatttcctgcgcttccagagtttcaaaaacactgtcgcggttgctaaggtaaacggaagggatttccagcaacgttaaggcatcgcgcacctgggcggcctcctggcggctgcgcaccagcacactgatgtcgctagcacgcaccggacgcgcgtcgtcgccgttcatcagcaacgcttcgccccgctgtccggcttgtagccagtcgcggatttgcgcagcacatacctgcgccatggtactttgataatcgccaacgccgcagctttcgccttccatcagccacattttcatcgcaggctgtgtttcacctttaaatacaaaacgtaacgcctgatttttcccggcacttttcactggaataaacggtatttcgcgaaacatgaacgcgtcatcagtctggctgaaaagcttattcacgctgttcaccattcctggtgcggaacgccagttggtgtctaaagtgtagtgggcgtgaacttcgctacgcgccttcatataagtgaagatatccgcaccccggaatgcatatatggcctgcttcgggtcgccaattagcaacaatgcggtttccggctgatggtgccagatacggcgaaaaattcggtactgctgggggtcggtatcctgaaattcatcgatcattgccaccgggaatcgcgtacggatcgccgctgccaacacctcaccgctttcgctacgcagcgcggaatcgagccgacttaacatgtcatcaaaacccaattcgccacggcggcgtttttcacgcgctactgtttcgcggatctcagccaatgcgcgggtgatcaccagatcgcggatgctcaatggttctgcaagcagttgatcgatcgcctcaaacagtggatgtcgcggggtttcccccccggccttcgtgcgatcttctaagaaacgctgggagaatttttccaggctctccggcaactgataactgtttgtctcttcttctgcccaggcgctgatcttgtcgatccatttagcctgattgctacggttaaacttgcgtcgatcaataccagaagattcgatcagcgcatccagttcacccactgcgtcgcgccactgctgttttaccgtatcaatacgcgccacaatttgcgcgtgacgggaagccagcgtttcatcatcgggcggcggtgctttgataaccggcgcttcgccttgcagataacgattaatatcgcgcagcaacgcctgcggccctttccaggtttcaaagacgacctgggctatttcacgcggcagcgggtagcagtggcgacgccagaaatcggcgcaggcctggtagcgtagcagagactcatcttcaatcagctgctgctcaaacagcatgccggattcaaaggcattcaggttgagcatgcgctggcaaaagccgtgaatagtaaagactgccgcttcatccatctgccgttcggctaacaacaaccactgcgcggcttgcgctttatcgtcgatctcttccagcaggcgttcgtacagtggattgtcggtggtttcacgcagacaggcgatgcgcaactcgtggatattgctacggatacgaccgcgcaattctgccgtggcagcctcggtaaaggtgaccaccagcagttcttcaacggtcagcgggcggggaaaggcggcggaaccgcctagtccaagtaacaggcgcaaatagagcgccgcaatcgtaaaggttttgcctgtgccggcagaggcttcaatcaggcgctcaccctgtaagggcaagcgcaaaggatctagtgtctcggcgacatcactcattcttttcactcatcaggggcattgtttgctgcaacgcgctgacgttctcccacactttccagccttcagggtgtacatattcggctttcccgttctggctgccggaaatctggctcagaatagccatgccttgcggctcgaccaccgcctgatggaagaaatcagcaagtttttgcggcgtcagcagttttatctgggccacgattttatcacggctatcgaagcgcatattgccgcgatcgaaatctttacttaacttgcttgcttcttcgccgagcgtttgcggtgcctgcagcatctgggtaattaccgcctgctggatttgcgcaaactcatctggcttcatcgctcgcaattttgcctctgcggttgggaaaaacgccttgtaacgctcccacaagaaactaggctgtttatcattgctttgcaaaaggaagcccatgccccactgacgccccacgctcattggaaacgcaaacacggcatagcccaattgttcttcggtacgcaactgattgtagaaccacggctgtacgatctgccccaacagagagctataggcactgctggtgtattcatcgtagccagtcggtacaaataccgctgccagtgcggagtcggtgctgttaccggctttttcaaagatgacggattgttttttatcgaccactacatctttgtttcgacaccactcactaccatcagcgcccaactgtttttgcacatcgcgtgccagcgttgttgcctgggcctcggtcatgttgccgataaccataaactctggtcgagccccactttttaaggcgtcgcgataggccagcacctctttcaacgtaatggagggcaaaattttacgccgttcatctcggctgaagtacggcacttggctgagcatctgcgcgggcataatcgcctgctcaaacgctttacccttttctgcggaatccatcatctggttataccaggacttcgcctgctcaagctgatcttccgtagcggtatagctaaagtacccctcgagcaatgcctggaacagctgcggcagacgctgggtgtaaccattagcattaaccataaggccgttgttagcgttggtggaaaaacttatgccaccaacgctcgcctggttgcttaactgatcaagcgccagccctgcgagataatcattgagcgcaaacatcacctgattgcgggcgctgtccatggctttcggattacgcaaaatcaggctgacatcagctttgggctcgctggcaaaataacggcttggcgcatacaccacgcgcagattgctctcatcaacaatcagctctggatggtcgtatttcttctcactcttaatcaggctgaaatcatcaggaatataagggttaagctctggcaaagagagcgcaatgtcggcggcttttttctgccagtcggcgaaagtttgtgcgctgattttatcgacctgatacggcgcatcgacaaagtaagccgttttgttgtgcggctctttcgggctgatataccagatacgcgcattctgcggcgtcatcatcgccagacgttcctttactgctttagcatcgtaccgatcggcaatattgactgcatccagcgtatgctcaacaggaacgcgaatcatggtatctgccagccattcgacgtaatccatatcacgggtgatgctcggataacggaagtcgatatccagcacattcgccagttcatcgaagtattgtttatcaatgcctttttcacgtaacagattgagatagctaaaaattgccgccacaacctgatcgcgattagccaggcctttatcggttaaagacgcagagatcgctaatacgccgctgttgccgttgacgataggatcggagttggcgctaatgccctcaactaatccctgcttttgcagccagtcagaaagtgtacctgggctgcgattgccaatcagataggtaatcaattcatcggttttactacggaacttcgcactgttgttatcgatgcgaaactcaacgcgcaacactttacgcggcagcgcagggacgtaatgaatgataatgcccttttgcgcgtcggtgactaccggcacggtgatttccggttttttgctctctttgttcggcacgcgaccaaaggtgtccgccgccatttttgccaactccggcagcggtttattactgtaaataaccgccttcatcaaattggcggaatagtacttctcgtggaaatctttcagcgcctgctgcaccggattaccaggtttgtcgcttaaagtttcgaggttaccaccagaaaacttactaccggggtgtgccgggttaatggtttctgcgctgacctgtgccatgcgcatcccgtcacgcgtacgcgccatggttaattcagcgttcaccgcattacgctcacgttcggcatatttcttgtcgagcaaaggttcagcaatagcatcggccaggcggtctaccgcaccaggcaaggcgtcgttctcaacttccagatagaaagccgtgcgatacggcgcagtgctggcattgtgactaccgccgtgcattttgagatattcggccagactgtcagcctgcgggtactttttgctccccatcagactcatatgttcaaggtaatgtgccagcccctggtacgcctcgggatcttccaggctcccaacgggcaccaccagcgcgctgaggcttttaactgcctgcggatcagaaaccagcaagaccaccataccgttatccagacgtatagcctgatactggcggttatctttatcacttttacggatggtttcctgaatcggctgccatcccgtttctgcctgacttaagggtgcccaaagggcaactaacaacaataatgctttgaaccaggtgctgcggggcattcacggacctcataatcaacttaattttctgtccagattcaacacgttaacgcaaatcatctgccagaatttaatcttgtgctgcacgagtcagcctatgtttatataaccatcagtccgtgactggtgcgcatcataaagtaagcggatagattgcgcaatttttatacagcactcaactctgattaaagcgaaacagcggtaacaggaaacgttggctctgttcaacgatggcctccattgtctctggtgttaattgccgccagagcctttgataccagatatcatcaccttcgccacgcaccatcatgttgccttcgtaagcctgaaggaatttcgtacgggctttttgcaacgtggaatcgtcatccagcatggcatcgttttgcgcgtcataacaggtttttagccacgcgccgccactttcaggtaacaccagcaatggcgcggacattccttcacgatacccctcaatcagttgactgaggtaatgcaaagcctgttcggctgcaagcggcggaaaacgccactcgccgtctttgcgtagaaaaaggcgactttcaccattaccaccgctggcacagtagacaaggtgttccagccaaagttgcattccctgggccacacttaataaagagggacgccagcgcaacaggccatccggctgcacctgcggcaaccagccagttatctgcacaccgttgcaggcgagatcaatttccatactctgccccggctggcgacaggcaatgactctgtcggcaagctgctgcatctcctggcactgtgtttcccagaaaatttcaccaaaagcgccatacggtaaatcccctgccgctcggaagcggcggaacaagcgttcggcatcatcctgctcaaccagtgcattcaataactgctgattgatttgataacggctaagtccttccagaataaatggctcggtgtcggggatttcgctgtcttcagtacggaagttcacctgcaaacgcatctggaaaaatgcccgcaccggatgtgcccagaatcgttgtagcgtttccagcggcacggtttccggtaaggtaaacggcagcggctgaacaaattcagaatgtgctttaccagcctggctggccgcaggtagccattcacgagcatagctttgtcgttcgcctggctggtagttttgtggatcaaacggcatccgggtatggaggcaagtaagatgcgcttttacccttgcctcgctttcatcacagttgagcgcttcatcgcccggtagataatgactttgcccgatgtagtcgatcagttcctgcaccagtacgctcgggaaacgctcactgttatcctgaatggaacgaccgatatagctgatatagagtttttgctgcgcggaaattaacgcttccaggaacagatagcggtcgtcatcgcgacggctacggtcgccacgcttcggtttctggctcatcaggtcaaagcccaatggcgcaagctgacgtggataaacgccgtcgttcattcccagcaggcaaaccactttgaacggaatactacgcattggcatcagagtacaaatgttaaccggtccggcgagaaaacgctggctgatacgttcttgatccagacgctgtgccagttcatcacgcaatagactcagcggcaccgcgtcgccatactgcgcacctaaaccttcggcgataatcgcctgccattgttgttcgatcagcgtcatcgccgcttcggtttccgcatccggcaggaagaaggcgttgagcatatcgcgacaaaccggcaaccactcttccagcggacgctcctgtgccagcccgcgacgccagatgtttagctgcattagcagactagccagatgccccaccagttctgcaattaagccgctgctttcatcataaggtagaacgctttgccactcgccctgcgcgctctccatcgcgtagcccaacaacatacgcgtcaggccaaatcgccaggtgtgttgtccggtggcggggagttccagctcgcgaacgttgtcgtcatctatgccccaacgaatgccggattcgttgacccactggcgtaaataacgcagcccttcttcggtgatgtcaaaccgcgccgccagcaccggcacatccagcaacgccagcacatcctcactcacaaaacgactgtcaggcagacttaacaggctgataaacgcttccagtaccggatgactctgccgcgcacgacggtcggaaatggcgtaaggtaggtaacgatccgcaggtgcgctaccaaacacagcctgaataaacggactgtagctgtcgatatcagccaccatcacgatgatgtcgcgcggagtaagtgtcgggtcttcctccagcatcgccagcaggcgatcgtgtaaaacttcaacttcacgctgcgggctatggcaaacgtggaaggtgatactgctatccagtggatcaagcgggcgtttgttatcgctacgggaaaactcttcgatgttcacaccagcaacggcgcggttttccagttccagaatgtcagactgaatgttatgcagcaggttatctggcgtgacatcgacaaaggcgtccagctcctggctgctctccaggtcagaaaggagataaatgtagtcgcgcccaagcttaccccaactagccagcagcgggttgccgacatcctgttcaccatcgctgttaaagagctgcccggcattttcgctatcacgaaatagcggcaattcgcgatcttcaaaactgtgtcgacgctgacgggtcagcagtttcgccagataagcaggatctttaatatcgccccagtaataacggcaggggttggtaaacaggagatggatttcaatatgtttacccagcgcctgtagcgcctggagataaacaggcggtaacgcggaaataccgcatataaagacgcggctaggtaaccccggcgggcaggtcgtcgcggactccagcgtttcgataaagcgctgatagagattggcgcggtgccagcgcggttgcccgagttgatgggtatattccaccagcgccttccacaacggggcttgccaggcctgtgcttctcccagcccttcaaccaaatgtcctgtttcccactgtgccagccagtccggacgatagaccagatactggtcaaacaggtccgccgctttactggaaagctggaacagttttcgcttgtcgctatcgtcagtcagataatgccgcaacagggtaaagtcttcgcgctccagcaattgcggcagcagagtcatcagtttccagctcatgctctgtttgttaaaggcgctctctttggggatttccggtaacacccggacgaacatatcccagataaagctcgctggcagcggaaaatcaatgtttgccgcaataccaaacttttggctcagggtcatttgcagccactgtgccataccggtactttgcaccagaatcatctctggttcgaaaggatcgtccagccgttcgcgttcgacaataaactccatcaacgcttccagcacgtccagacgattggaatggtagacccttaacatagcggctcctgattactgacgattcgggcaatgcaggcgggtcatctcgccttctctgcccccgggactaactagcgtaacgctgatgctgacacatcccgcctggcttgtctgcattcggttgacctgccagttggcaggtgggctaatcgcgcgcagttgcgtttgctgccagccatgccgccagagctgttggtactggtttctgctggcaagactgttcattaatgttcgctggaaaccgcttaacgcagtgacaatcatcaccatcaacaccatcgccaacattacctccggcaggctaaagccttgttgattcttcagggaagcactcataacgccctctctttcagcggttaaatcagggaagctgacataacgccctctctttcagcggacaaaaatcgctccagccgcgtgggctaaaaacaatgtttccatcaatgacttcgcctgttcgccacaagctaacgccttcataaccggcaatcaataaggcttcattatctgccagtaaacgcaaacaaacctgggcatcggtttcagcgtactggctgcactgaactgctggctgcgtctgccagcagtgcatttttccccacgccagcgcgctctgaacgatggcctggcggcgcaaactctgactttccatgctcacgcgagaggcaaaactgcgatcctgttggctcattccttgtaatagcaaactacccaaaaccagcagcatcaggaccagagccagactgctaacacccttttcgcggttcacaggttgaatcctgtcacgctatagctggcattcaccacggtttgcggttcagacttactggcagcacgcatattaaccgtcaacaccgggctgaagccgctgacatcctgacgtacgacctgaaaagtgtcgataatgatggcatccggattagtgactttatcccagcccttaccttcacaggatgtcgcaccgcgtagcgtttccagcacatgctccttcagacgaaatccaatctggtcggactcttttaccggttcgcgatcccagataccgttactgttcgcatcccactgcacaatgacacagtcaccctgtccgacaatttccagcccttcgccggtacagatgccatgacaataacccgccctctggagatgcttcgcgacggtaaatacccgcagccagatttcatcttccagcgccagcttacgggtgctcgttaaactttcacgctgtaacgcaggcagaaagcgtgccgcccccagcaacaatacgccactgatcgccatagcaatcaacacttccagcagagaaaaaccttgctcttttacaggcatccttctgtttctccttgctgacaaagccggagtcttccccacgggctaaccaccagccaccactcgcccgtactgtttttgaagcgaatatgcccggcccatgcggtattgcgcaggccaaagaaagcaaggctaggtgtcaggtcgctcatttcgacttcgggccagcgtggcacaaagaccaatggactactgccatgacaggtattggccccagcagcggaactcacaaggcaccataacgtcccctccctgataacgctgatactgtggtcgcggttatgccagttggcatcttcacgtaaatagagcaaatagtcccgcgcctggctggcggtttgccatagccgttggctctgctgccagtattgccagccatagagtccacttgcgcttagcatgaccaaaatcagcatcgcgaccagcgtttcaatcagcgtataaccacgttgtgttttcatgccggcagtatggagcgaggagaaaaaaagacgagggccagtttctatttcttcggcgcatcttccggactatttacgccgttgcaggacgttgcaaaatttcgggaaggcgtctcgaagaatttaacggagggtaaaaaaaccgacgcacactggcgtcggctctggcaggatgtttcgtaattagatagccaccggcgctttaatgcccggatgcggatcgtagccttcaatctcaaagtcttcgaaacggtagtcgaagatggattcgggtttacgtttgataatcaacttcggcagcggacgcggttcgcggcttaattgcagatgagtttgatccatatggttgctgtacagatgcgtgtcgccaccggtccagacaaaatcacccacttccagatcgcactgctgcgccatcatatgcaccaataacgcgtagctggcaatgttgaacggcaggccgaggaagacgtcacaggagcgctgataaagctggcaagagagtttgccgtctgccacatagaactggaagaatgcatggcacggtgccagcgccattttatccagttcgcctacgttccacgcactaacaataatgcggcggctatccgggtcgtttttcagctggttcagtaccgtagtgatctggtcaatatgacgaccatctggcgttggccaggcgcgccactgtttaccatacactggcccgaggtcgccgttttcatcggcccattcgtcccagatggtgacattgttttcgtgtagataagcaatgttagtgtcgccctgcagaaaccacagcagttcatggatgatggaacgcaggtggcaacgtttagttgtcaccagcgggaatccatcttgcaggttaaaacgcatctgatgaccaaaaatggaaagcgttccggttccggtacggtcgtttttctgtgtgccttcgtcgagcactttttgcatcagttctaaatactgtttcatggttcctcaggaaacgtgttgctgtgggctgcgacgatatgcccagaccatcatgatcacacccgcgacaatcatcgggatggaaagaatttgccccatgctgatgtactgcacccaggcaccggtaaactgcgcgtcgggctggcggaaaaactcaacaatgatgcgaaacgcgccgtaaccaatcaggaacaaaccactgacagctcccattgggcgtggtttacgaatatacaggttgaggataataaacagcaccacaccttccagcagcagctcgtaaagctgacttgggtggcgcggcagcacaccgtaagtgtcgaaaatggattgccactgcgggttggtttgcagcagcaaaatatcttctgtacgggagccagggaacagcatggcaaacgggaagttcgggtcaacgcggccccacaattcaccgttaataaagttgcccagacgcccggcaccaagaccaaacggaatgagtggtgcgataaaatcagagacctggaagaaggaacgtttagtacggcgggcgaagataatcatcaccacgataacgccaatcaggccgccgtggaaagacatgccgccgtcccagacacggaacagatacagcggatcggccataaactgcgggaaattgtagaacagaacataaccaatacgtcccccgaggaagacgccgaggaagcccgcatagagtaagttttcaacttcatttttggtccagccgctgcccggacgattcgcccgtcgtgttgccagccacattgcaaaaatgaaacccaccagatacatcaggccgtaccagtgaagcgccacgggtcctatactgaaaatgaccggatcaaactccggaaaatgcagatagctactggtcatctgtcaccacaagttcttgttatttcgctgaaagagaacagcgattgaaatgcgcgccgcaggtttcaggcgctccaaaggtgcgaataatagcacaaggggacctggctggttgccggataccgttaaaagatatgtatatgatccgcgttataaccctccgcgaatcagcccgcccatgccgcgacgctccataaaggctgcaacctgatggcgaacttcggtcgccagttgcgcttccagactacgctgcgcaagattttctgcttcggcataatcaatgcgccgcagcaggtattttgcccgcgctacagaacgtccgttcatagacagatggcgatacccaagcccaatgaggattgccacgcacatgggatcgcccgccatttcaccgcacaaacggagatcgattccatgtatttccgcttcccgggcgatcatcgccagagctcgtaacattgcaggatgaagactgtcataaatgttcgccacccgggtattgttgcgatcaacggccagaatgtattgagtcagatcgttggtgccaacagagatgaaatcgacccgctttgccagatgcggcagcataaataccatactcggcacttccagcatgatgccgatacgtggtttgggaatttcgtaaccgatcatctcctcgacttcacgtccggcacgttcaatcaggcggcgtgcttcatcaacttcatcgaggcttgtgaccatcggcaacagaatattcaggttgcccgtagcggcattagcacgcagcatcgcccgcacctggatcaagaagatctccggctgatcgagcgtaatgcgaatcccacgccaacccaggcatggattctcttcgctgatcggcatgtaaggcagctgcttatctgctccgacatccagcgtacgcaaggtgacgggtttatcattgaacatttgcagcatcccctgatactgcgccacctgttcttcttcgctcgggaaaccactttgcagcatgaatgggatttcagtgcgataaagaccgatgccatcaatacggctgcccagtttttcttcatgttccgggcttaaaccagcattgagcatgacttttatacgctcaccgctttttaactgcgcgggtaaattgacgtcatcttccgccagacggctaagctcaatctcttcactaattagccgctgatattcttgcagcagtaccggctccggatcgaccagcaattcaccgcgatagccatcaacgatcagcgtcctacgatgcagcacgctaggctgaatatccgcgcccatcacggtagggatccccagcgcacgtaccatgatcgcagcatgggagttggctgcgccatctcgcacgacaacaccgactaagcgatcctggggcagctcagcaagcgttgtcgcactcagttcatctgccaccagaatgaaacgttccggccaggcgttcggcccttgattagcgtcatcaagatgaaacagcaatcgctgacccagcgcacgtaaatcgccagcccgctctttgagatagttatcacttagcgcggcaaactgttcggcaaatttttcaatgaccgtttttaccgcccactctgccacgctgcctttatcaacctcggcaaacaattcgcgacgcagccgggtgtcgctaagcaggtggctgtaaagatcgaaaatagccgccgtttctttttgtgcaccggcggcaaagcgtttgctgtagcggcgaaactcgtttgccgcttcttccagcgccccggtcagtcgttcgcgttccagagccggatccagcgtacttgcctgatacacctgttccattaaaggtaacgtggcatcctgccagccttcggcaatcgccacaccaggtgctgccggtaatgcgcggattcgcgtctggcgatattgcccaaacaaggcagtcaactggctctgagaaagaatagctgccatctgggtggcaagcgtcaccaggaaggattcttcactttcgtcatactggcgcaactctcgttgctgtaccaccagtacaccaagcaactggcgacgttgaataattggtacgcctaaaaacgcgcggaaacgttcttcttttacggaggggatgtatttgaagctggggtgcttttgcgcatctgcaaggtttatcggttccgccagcctgccaaccaggccgacgatcccttcatcaaacgcgagcgttacagtgcgaccgcgtggttttttcagcccccgggtcgccatcaggtagtaacaacgtcgatcatgatcggccaggtagacgctacagacctcggtatccatcgcaagacagatgtcggtaaccagaatatttaacgcctcattcaggcgtggtgcgctggctaccttttcgactatttcgcgcaggcgagtgagcataattggcgtgacttaacctcttttacgtcgataagcagatgcgttttgtggttttggcgtattttcctgcagactcatcaccacactcgcgaactctttcattaccctacggtagacatcacgtttaaaactcaccacctgtctgaccggataccagtaacttacccatcgccagccgtcaaactctggtgtactgctggtttgcatattgatttctgcatcgccgctcaccagctgcaagagaaaccatttttgtttttggccgatacaaaccggcttcgtgtcccaacgcaccaaacgtttcggtaatttgtagcgcaaccagttacgcgtactagcaaggattcgaacgtctttgcggcttaatcctacttcttcaaacaattcacggtacatcgcctgctctgcggattctccggggttgattccgccttgcggaaattgccaggagtgctgaccaaatcgccgggcccacattacctgcccctggcgattacaaatcacgatacctacgtttgggcggtagccatcgtcatcaatcaccggactacctcaaaataaagctttatatacgaatgattgtttcatactccaggaagacggtaaaccactctctgcagggcattacacactaataacaattgaataactcacagttatgtgcagagttataaacagaggaaggggtggatagccgtttttattcaccttttctgtggatagagttgtgaagaactacggaattactacgggaaaacccggagcattctgaataagcccgatatagacattttaaaatattcattatcagtcaatgcattacatgtaattttagtaatgaaaaagagtaattcgtgacccaggtcacacctctcatttacgggttggcgaaagatcaaccaatgccgtatttatccacagaatgtgccactaagttaagcactgaaccactaaaaactggagtttcgtcgcacgtcaaggctgtaaatggaaacagtagtggaggtttttcacagttatcccagctttctgtggataacatggtgtaagatcctgtttattttcagtgaccagatttggaaaacccgttgcagtgttgcgcaactcgattaccggcaacctaaaaagcaatataaatcagagaattgaacaacgcatgtggaaaaagttacactgcgaatattcggcacataattgctgtttgttttttaatcaaggtatcatgacatgtcccaacctcgcccactgctctctcctcccgaaactgaagaacagttgttagcgcaagcacagcaactttctggttatacattgggagaactggcggcacttgtcgggctggttacgccagagaatttaaaacgcgataaaggctggattggcgtgttactggagatctggctaggtgccagcgcagggagtaaacctgagcaagattttgctgctctgggcgtggaacttaaaactatccctgtggatagtcttggtcgtccgctggaaacaacattcgtttgtgttgccccgttaacgggcaatagcggggtgacctgggaaaccagccacgtgcgccacaaactcaaacgcgtactgtggataccggttgaaggcgagcgcagcatcccgctggcgcagcgtcgcgttggaagtccgttgctgtggagcccgaatgaagaggaagaccggcagctacgcgaagactgggaagaattaatggatatgattgttctcggtcaggttgagcggattaccgctcgtcacggggagtatttacagatacgaccgaaagcagcgaatgcgaaagcgcttaccgaagccattggtgcccggggcgaacggattctgacgctgccacgcggcttttatttgaagaagaatttcaccagtgcactactggcccgtcattttctgatccagtaaccatcgctttgacctgccgctttccgggcatataattaccgcttcatttttttggcagggctttttagatgttatttgcatggataaccgatcctaacgcctggcttgcgctcggtacgctgacgctgctggagatcgttcttgggatcgacaatattattttcctttctctggtggtggcaaagcttcccacagcacaacgtgctcatgcgcgccgtctggggttggcgggagccatggttatgcgtctggcgctgctggcaagtatcgcctgggttacgcgcctgacaaatccgctttttacaatattcagtcaggaaatttctgcccgtgatttgattctgcttctgggtggcttgttccttatctggaaagccagcaaggaaatccacgaatccattgaaggtgaagaagaagggctgaaaacacgcgttagtagtttcctcggcgctatcgtgcagattatgctgctggatattatctttagcctcgacagcgtgattacggctgtgggtctgagtgatcacctgtttattatgatggcagccgtggtgattgccgtaggcgtgatgatgttcgccgcgcgcagcattggtgattttgtcgaacgccatcctagcgtaaaaatgctggcgctctctttcctgattctggtgggctttaccctgattctggaaagtttcgacatccacgtaccgaaaggttacatctacttcgcgatgttcttctctattgcggttgaaagcctcaacttgattcgcaacaaaaagaatccgctctgatactccgtacgctctcctgcgggagggcgtactcactccttttaccctcacagtttaagattttcctgctttcaagatatataacgtcggtttataaacagactattatcataggtaggccaaatgaggataaccggatgaaaaaatgggcagtaataatttctgcagtcggactggcgtttgctgtttccgggtgttccagtgattacgtcatggcgaccaaagatggccgtatgattttgaccgatggaaaacctgaaattgatgatgataccgggctggtgagttatcacgatcagcaaggtaacgcgatgcaaattaaccgtgatgatgttagccaaattattgaacgttaacaaataaggtcagcatccggctggccttaagatttttctctttcccttttcccttccctctgccatttttatattccttatgtcgtgattataaaaaggaaacggctatgcaatatcaccgtataccccacagtagcctggaagtcagcacgctggggcttggcacgatgacgtttggtgaacagaacagcgaagccgacgcccacgcacaactcgactatgccgtcgctcagggcattaaccttatcgacgttgccgaaatgtacccagtacctccgcgccccgaaacgcaagggttaaccgaaacctacgtcggcaactggctggcgaaacatggcagccgcgaaaagttaattatcgcctccaaagtgagcggaccgagccgcaataatgacaagggcatccgcccggatcaggcgctggatcggaagaatatccgcgaagcgctgcatgacagcctcaagcgcctacagactgattacctcgatctttatcaggtgcactggccgcagcgcccgaccaactgcttcggcaaactcggttatagctggacggattctgcgcctgcggttagcctgctggatacgctggacgcactggcagagtaccaacgcgcgggaaaaattcgttatatcggcgtgagcaacgaaactgcatttggcgtaatgcgctacctgcatctggcggacaaacacgatctgccgcgtattgtcaccattcagaacccttacagtctgttaaaccgcagttttgaagtaggtctggcagaagtcagccagtatgaaggggtcgaactgctggcctatagctgcctgggtttcggcacgctgaccgggaaatatctcaatggtgcaaaacccgctggcgcacgtaatacgctctttagtcggttcacccgctatagcggtgagcaaacgcaaaaagccgtcgcggcgtatgttgatatcgccagacgtcatggcctggaccctgctcagatggcgctcgcgtttgtacgccgtcaaccgtttgttgccagcactctgctgggcgcaaccacgatggatcagctgaaaactaacatcgaaagtttgcatctggagttaagcgaagacgtattagctgaaattgaagcggtgcatcaggtttatacttatccggcaccataagattaacgccggttaaaaccggcgttaaatattaatgacggcgctgccagatccacagcgccgttattgccagcgcaaacagcgcaccgaagccaatgccaatgggcacgaccgggatgcctatcattaccgccaggctgtaaatgcccagcatcaacaacatggcgctgttttcgccaaggttttgtactgcaatcgcattccccgccccgacgctttttttaccccgctcctgtagcaacgcattgagcggaacgacaaaaaagccccccatcacgccaatcagcatcaacaaggcataggctggcagcagctcgtgttgcagggaaaaaatcagtaccaccacgccaatcaaaatcccggctggcatacagcgactcacggtttccagcgtaactaacttcgctgccgcacctgcgccaaccacgataccaatcgctaccatcgcgttgagataggtgggcgtagcgttatcggtaatgcccagcgccaccggtacccacagcaccaacaggaaacgcagcgtgacacccgctccccagaataaactggtgcccaccaggctaaaacgcgtttcaccattgcgccataggctggtgcaggcattcaggaaactgcgggtcatgttgatgagattccaggactgccccggacgcgccgccgccagtttgggaatgtagatattggcaacgaccgcaccaccgtaggccagtgcgcatgcggccagggcgacgaggacatgccagtcagccagcacaccaccggctacggaaccgagcaaaatcgccgctatggtagaagcttccattaaaccgttagctttcactaacttactacccgtggttaattcgccgagaataccgtatttcgccggactataggctgcagcaccaacacccaccagcgtatagccgagaaacggattgataccaaagcagatactggctgcgcccagcagcttcaggccgttggcaaacatcatcacccggcctttggcgaagctatccgccacctgcccgacaaacggcgcaaaaagaatgtaagcacctacaaacaccatttgcaggatgggctggctccactccggatagaactgcgctttcagtaacgccagagtggcaaacagtagggcattatcgccaaacgcagagagaaactgcgccacgataaccgctttcatccccttgctccacaagctagtgttagtgtgcacactctcactcatcgtgttgttccgcttcgtctacccagcttttcaacgtgacaaagtcaggtttgccgctgccaagtaatggcatctgtttcagatagcgaatatcgcgcggtacagcaagctccggcacgccgtgctcgcgggcatactgttgcaacttatcgcgcgtcagttcgttatctgtggtgaaaagcaccagtgcctcgcctttgctggcatcgctcttaatcgcagtggcatggactttatctgggctaacaccaagtgccagttgttccaccatttccaggctcaccatttcgcctgcaattttggcaaagcgttttgcgcggccctgaatctgcacaaagccctgctcgtcaaaacgcacaatatcgccagtgtcataccagccgcgctccatttcgccgcgaacattctcggcggtgggcacttccagtacacctggcttctccacccgcagatagccgttcattatgttcggccctttcagttgcaggcgtccgccctcttcgataccagggacgctcaacaggcgcgcatccattcctggtagaatacgccctaccgtaccgggtttcgccgccatcggtacgttgatagaaacgacaggcgcgcattcggtcacgccgtagccttcaaggatgcgcaggccaaatttatcctgccaaagctgtttggtactttcttgtaatttttctgcgcctgccaccacatagcgtagacgatagaagtcatacgggttggcgaaacgcgcgtagtgaccgaggaaagtgctggtgccgaacaacacggtgcaactgcggtcatacaccaactccggcacaatgcggtaatgcagcgggcttggataaaggaacacttctgcacctgtaagcagtggcgtaaacaggcctaccgtcagcccaaaggagtgaaacagcggtaacgcgctcataaagcgatcgttggtggtgaagtcggcaatcgttttaatctgctcgacattcgccagaatgcttttatggctatggacgacgcctttcggatggccttcagaaccggaggtaaaaaggatcagcgcctcttcttccggctgctgtttaacctgtgccagacgcggcatcagcaaatgagcgaagatccatactttgtcggcagtggtgacatctgcttttaaatcttccagatagacccagcgcacctgagtaagttgctccggcagatgccagagtttgcctttatcgagaaactggcgggaagtgaagatggttttgatttcagccgccgtaatagcactggtcagcccttttaccccggcagtgtagttcatcattgcgggcatgcggcgacgggcgatggccccaaaaatcactgccgcactgatgcctgcattgggcagcattaagccgatgcgttcgccttcaacactgtatttttcaaggatgcgtccaacaaacagcgttttcgtaagcaatttgcgataggagtctggggtaaagttgacgtcttcgacacatttcttcccggctccgaagcggtacattgcactcagtaaagattcgtacagcgtttcacgcgggcgcaccgccattcgcgcttccatcattatttgatgcagcatttcgccagcgattttgcgacggtcacgggcacgcggcgcatccggcatcgccacctgcgttggtggcaaaatatgcagagtaatttgcgggaacaagcgacgtttaaccagacctttcaggcggctgaagtgcgtaagttccgccccttcaatacgcacaggaataaccgtcgcaccagacttcgccgcgacaaaacccgcgccatcgtagattttcatcaggctgcctgtcgtggtgatgcgtccttcagggaaaatcaccactggtcggccctgttccaccagacgtaccagatgtttaatagccataggttgcgtcgggtcgagaggaacaaagtcgataaaacttttcagccaacgcatataccactgttggcttatactggtgtaaacggcaaacactggacgcacaggtaaaaacagtccaagcaaaatgccatcaataaaagagacgtgattaggcgtaattagaacgcgctcgcccttcagtgcctgggtgtcacccgtaacgcgaacgcgatacaaaacacggcacaaatttcgaaaaaagctaaaaagcattccaactccctttgctctgattcagtaaaagcgaatggagggagattacacgagataaagaacgcgagcgacagtaaattaggtgcgaaaaaaaacctgcgcatccgcgcaggttggtgcaagagacagggtacgaagagcgtaccgaataatctcaccaatcaatacctctgggatcttgattgtggtctgcacgacgactcttcgccagcgagaaaacgcaaaggaatgaagggaaatgcaacgaggtgtgtaaattgtcggttactgttacagattgatgaccggcaaaaaaaacctgcgcatctgcgcaggctggtgtaattcatgtgctcaacccgaagttgacttcacctatcaatacctctgggatcaccactttagcaacctgaagccaaacgccaccagcggtcaatcgcaacagcgtttcgcaaagtgtaaccaaaggtttgcaatctctttttttgtcttacttatttgcgtttggctcacattcccacgatgaaaacacgccaccccttgaaccaacgggcgttttccgtaacactgaaagaatgtaagcgtttacccactaaggtattttcatggcgaccataaaggatgtagcccgactggcaggcgttagtgtcgccaccgtttcccgcgtcattaataatagtcccaaagccagcgaagcttcccggctggctgtgcatagtgcaatggagtctcttagctatcacccgaacgccaacgcccgtgcgctggcgcagcagaccactgaaacggtcggtctggtcgttggtgatgtttccgatccgtttttcggtgcaatggtgaaagcggtcgaacaggtggcttatcacaccggtaattttttattgattggcaacggttaccacaacgaacaaaaagagcgtcaggccattgagcaactgatccgccatcgctgtgctgcgttggtcgtccatgccaaaatgatcccggatgctgatttagccagtttaatgaaacaaatgcccggtatggtgctgatcaaccgtatcctgcctggctttgaaaaccgttgtattgctctggacgatcgttacggtgcctggctggcaacgcgtcatttaattcagcaaggtcatacccgcattggttatctgtgctctaaccactctatttctgacgccgaagatcgtctgcaagggtattacgatgcccttgctgaaagtggtattgcggccaatgaccggctggtgacatttggcgaaccagacgaaagcggcggcgaacaggcaatgaccgagcttttgggacgaggaagaaatttcactgcggtagcctgttataacgatagtatggcggcgggtgcgatgggcgttctcaatgataatggtattgatgtaccgggtgagattagcttaattggctttgatgatgtgctggtgagtcgctatgtgcgtccgcgcctgaccaccgtgcgttacccaatcgtgacgatggcgacccaggctgccgaactggctttggcgctggcggataatcgccctctcccggaaatcactaatgtctttagtccgacgctggtacgtcgtcatagtgtgagtactccgagcctggaggcaagtcatcatgcaaccagcgactaaccgcagttaaagcaattccagcgccagtaattcttcgatggtctggcgacggcgaatcaaccgcgcctgaccattatcaaacagaacttctggtaacagcggacggctattgtagttggaactcatacttgcgccatatgcccctgtatcatgcagtaccagataatcacctgccttcacttccggcaaggcgcgggtttcaacatttcccccttcctgctgggtaaagacatcgccgctttcacataacggtccggcgacgacggtttccaccgttggcgcgtgttccagagaacgaccatcagctgccagggcactgatatggtggtaactaccgtacattgccgggcgcatcagatcgttgaacccggcatcaaccagcacaaagtggcggctccccatttgtttgacgctccgcacctgagtaattaatacgccagactgcgctaccaggaagcgacccggttcaatttccagtttcacagggtggcccaaatggcgggcgatttgctcacgcgcggcattccacagaccataataatgttcggtatcaaccgcctcttcaccctgttgataaggaacagaaagcccaccgcccgcagaaatagcctgtaaatcctgaccgaattcgatgacctgacgcaccatagcaccacacacctgttccagatgggcataatcaacgccagaaccaatgtgcatgtgaatgccgaccagctgcagatgatgacgttgtatcacgtccagtgcggcgggcagatcggtgtaccagataccgtgcttgctgttttcgccaccggtattggttttttggctatgtccgtgaccaaaccccggattaacgcgcagccatacccgatgccctgggctaacctggcccagttggtcgagcatatcaacagaacccgcattcaccggaatttgcaattcactgacgcgttcaagcgtcgcctgatcgataacatctgccgtaaaaacaatatcatcggggtgcgtttgcggattgtaacccgccgccaacgcacgctctatttcgcctaagctgacggaatccactttcacgccctgctcacgcattaagcgcaaaatatgaatattggaacaggctttctgtgcaaagcgcaccacatcaaactgtttcagcgctgcaatctgccgacgaataatttgcgcatcgtagacccacaccgggcagccaaattcagcgggcaaacgcagcagattttcggcggtgagatcggtatcggtgctgaacagactatgtggcataacaaactccagataagtgcttttttatgattacgccacatcataaaaagaataaaaaatatcgatttatgtcgagtctatgcaaaaatgatatggattaccggattgcgagagagcgctaatggccgccgttaacttacgtcatattgaaatttttcatgcggtaatgaccgccggaagcctgactgaggcggcacacctgctacacaccagtcagccaaccgtcagccgcgaacttgcgcgctttgagaaggtgatcgggctgaaattgtttgagcgcgtacgtgggcgattacatcctaccgtgcaaggactgcgtctgtttgaagaagtgcaacgatcctggtacggactggatcgcattgtcagcgccgcagaaagtctgcgcgagtttcgccagggagaactgtctattgcctgcctgccggtctttagccaatcttttttaccgcagctcctgcaaccctttctggcacgttatcccgatgtcagcttaaatatcgtgccccaggaaagtccgctacttgaagagtggctcagcgcccagcgtcatgatttaggactcactgaaacgctccatacgcctgcgggaacagaacgtaccgaattactctctttagatgaagtgtgtgtgttacctccgggtcatccgctggcggtaaaaaaggtattaacgccggatgattttcagggtgagaactacatcagcctttcccgtactgacagctatcgccagttgctggatcagctatttactgaacatcaggttaaacgacgcatgatcgtagaaacccacagcgccgcgagtgtctgcgcaatggtacgggcgggggtaggtattagcgtggttaacccgctcaccgcactagattatgcggcaagcggtttagtggtgcggcggttcagtattgcggttccgttcaccgtcagcctgatccgccccctgcaccgcccgagtagtgcgctggttcaggcgtttagtgggcatttacaagcggggttaccgaaactggtcacttctcttgacgctattttgagcagtgctacgacagcataattagctcagcataaaagcgacagcatcctcggcatggatcgccgcggtatcaaacacaggcaaaacactgcgctcttctggcaccagtaaaccaatttctgtgcagccaaaaatgacgccctgtgcgccctgttctgcaaggcgagcaatcacttgcgcacaataagcgcgactcgcttcggtaaattgccccagacacagttcttcaaaaataatctgattaattttcgcccgttcatccgcttcaggaataagacaattgatggaaaattgttccgtcagccgcccgcgataaaaatcctgttccatggtgtaacgcgtacccagcagcgccacacgagtcattccggccccggtaattgcacgtccggtggcatccgcaatgtgtaagaaaggcagagtgcaacgactctcaatggcatccgccactttatgcatcgtattggtacatagcacaataccttctgcgcccgcccgctgtaagccaagcgccgcctcagccagaatgtccccggttttatcccattccccgcgacgctggcactcttctatttcatgaaaatcgacgctatgtagcagcacttgcgcagagtgaagcccaccaagccgctgtttaatgccttcatttatcaaacgatagtaaggaatggtggattcccagctcattcctcccagcaaaccaattgttttcattcctctctcctgatgtgtgttaccgcaacaaggctgaataaggaacgagacaaacgcctcaacggccaagtgcccaatctctattaacgaaaaaagggccggatgtacagcacatccggcccgtgaaatcagacgccgatatttctcaacttctcgcctgccatcagtttgcgttcgatatgttccagcgtgacatttttggtttccggaatgagccagaaagtaatgcccacaaacgcaatgttcagcgcagtgtagagccagaacgtaccggcagcgccaatgctatcaagcagtgtcaggaaggtcgcgccgataatcatattgctcacccagttcgtggtggtgctacaggtaataccgaaatcgcggcatttcagcggctgaatttcagagcacaggatccacaccactggcgcggcgctcatcgcataaccggcaatacacatcatcgtcatgccaacagagagccaggacaagccactggaagccgtaccgttatcaaactgcatcaggcaatagcccagcaccagagtgcctaacgccatcacgctgaaaccaattttcagagccggtttacgccctgctttatctaccgtaaacaccgcaataaaggtggcgaacataaaggtcagccctacgaccagagtcgcaatcatctgttgttctgtggtcgtaaagcccgccattttgaagatacgcggcgcgtagtacatgatgatgttcataccggtaaactgctgcatcgcctgcaacaacataccgagaaacacagcacgacggacgttacggttgatcttaaacagtgcccaaccgccctgttttaacttcaggctttcacgaatttcgttgagttcttctcgcgctttttcgctcgtatcgcgcagcatacgcaatacttcttccgcctcaatatgacgccccttttccgccagccagcgcgggctatttggcaggaagactaccagaataatcagcagaactgctggtaaagcaagaacccccaacattgcgcgccagttaccgctataactgaacgctgtatcggataaaaacgccagcacgatgccgagtgtgaccatcaactggtacatactgatcatcttaccgcgaacgttttcacttgccatttcagaaagatacagaggagcggtgtaagacgcgatcccgacagcaatgcccagcaccacacgagcggcgattaacatctctacgctggtcgcaaaagcggaccctatagaaccgagtacaaacaggatggcccccgccatcaggctgtatttacgccccaggcggaagctcagccaaccattaaacagcgcaccaattgctgcaccgagcatcatgctactaaccacccattcctgcaaacgactggtcagcacaaagtgatcggtaatgaacggcaacgctccggcgattacgccgatatcaagaccaaataacaatcctgcgaccgcagcagctacgctaacaaacatattcatacgccgcgtatcccgcaaagaacgtggcgttaaagcagattccgtattgatagtaaccattttttcctgccagcagagagtaagacatagtgaaaaaatacgtgaacaactcacgcaggtgtcaggtcggaaacagcataaatatggattaaattgctgcgacatgtcgttatgtgatggatattccaattttcaaattaagttgaattattgagattattattaaccacctaattttacagcagataaaattcataaagttcattaattgataattaatatggattatttcataaccatgatatggattatgatgatctacaggtataaaaaaccctgccatgcggcagggtcataaaagtaagaagaatgaattaacgcgccagccaaccgccatccacggcaatggtataaccattcacataatcactagcgctggaggcaaggaacactatcggccccatcaggtcactcggcagtccccaacgaccagctggaatgcggtcgagaatttccgcgctacgttgttcatctgcccgtagttgttgagtattgttggtcgccatgtaacccggggctatcgcattaacattaatgttgtgtttagcccattcgttcgccatcaatcgcgtcacacccatcacgccgcttttacttgcggtataagaaggcacacggatcccgccctggaaggagagcatactcgcgatattgataatcttgccgccattgccttgcgcgataaagtgtttcgccgctgcctgagacatgaagaatacgctcttgatattcaggttcatgacatcgtcccagtccttttcgctgaactcgagagcatcttcgcggcgaatcaatccggcgttattcaccaggatatcaatatgaccaaactccgctaccgcgcgatccagcagtgctggaataccatcaatctttcgcagatcggcggtcaggcttaaaaaacgacgccccagcgctgtgacctgctcgatggtttcagtcggttcaacgatgttaatgccaacaatgtcacagcccgcttgcgccagccccaacgccatcccctgacccagtccagtatcacaaccagtgacgaccgcaactttaccttcgagagaaaatgcacttaaaatcataacaataccttattcgtttatgcccacaattagcgcaaatctttaacggccacatggtccatatcatcaaagacctggttttcaccgaccatgccccagataaaggtataagctttggttccgacaccggaatggatgctccagctcggggagatcaccgcctgctcgttatgcatcacaatatgacgcgtttcttgcggctgccccatcatgtggaaaacgcaggcgtcatcatccatattgaaatagaaataaacttccatccggcgctcgtgggtgtgacacggcatggtgttccacaagttacccggagccagctccgtcagccccatactcaattggcaggtttccagtacatccgggacaaaatatttgttaatcgtgcgacggttactggtgaggttatcgcctaacgtgactggagatacttcgtccggtgtgacttttttggtgggatacgtcgtatgcgcgggtgcgcaattgtaataaaacttcgccggagtgccggtatcaatactggcaaagacaacttcttttgcacctttaccaacatacagggcgtcgcggtgaccgatttcatagcattggccatcgacagtaatcgtaccggcaccgccaatattgataacacctaactcgcgacgttcaaggaaatagcttacgccgagttgtttaccaacttccccgccaacggaaaccgttttagttatcggcataatgccgccaacaataattcggtcaatgtggctgtaaaccatggtgtactcatcggcgacaaataccttttcaaccaaaaattcattgcgcagcccttgggtatccagcgtttttgcgtgcgcactgtggatgctctgtcttacgtccacatcaacctccgataatcagtgaagcgtgaaaatagaaaacgatagtgaaacactgtttcgttttctctataaagggatgatatgcccatgggctagggttttcaattaaaaataaaacaatgtttcatttttaagttaaggattaaaaaaagtgcagtgtcgatcacgaatatgtcatgagaatggaaaaatgagggagcccagaaaatgtatgtcgacttgccagccatcattattcaacagattaatgacggcagatatttatcggtaaggaggaaatgcagagttattcgtcacgttcaatggtcaatgccacaccctggcccccgccgatacaaagcgttgccagtcctttgcgggcattacgtttcaccatttcatgaaccagagaaaccaggattcggcaaccggaagcgcctatcgggtgaccgagtgcgatcgcgccaccattgacattgacccgacgctcatcccactcaagcatcttgccaacgctaagcgcctgtgcagcaaacgcttcattagcctcgataagatcgacttcagccaactgccagcctacacgctccaggcaacggcgggtcgcatacaccggcgcaattcccatcaatgccggatctacaccaacgctggcaaatgcgcgaatgcgggccagcacgggtaaattcaacgctcgtgctttggcttcgctcatcatcattaccgcagctgcgccatcgtttatggaacttgcattacccgctgtcacagaaccgagactatcaaaactaggatttaaacgggctaagccttctgcgctggcgtcagtgcgtggctgttcatcggtatcaacaaccaacgtctgcccgttactttgggtcattaccgggacgatctcatctttaaatcgtccggcgtcaatcgccgctcgcgctttttgttggctgctaagtgcgtaagcatcctgcaactgacggctgatgccatattcgcgagccagattttcggcggtgacaccaatatgataatcattgaaggcatcccacaacccatcatgcacaagactgtcaaccaactggctattgccaagctgtgcaccggtgcggctatcagtcagaacatgtggtgcgcggctcatgttttcctggccaccggcgatgacaatatcagcctcgccacactgtatcgcctgagtagccagatgcagtgctttaagcccggaaccgcaaacgtcattaatagtgattgcagaaacgctattaggcagaccacctttaatagcgctttgccttgccggattctgccctgcccctgcagtcaacacctgaccaagaattacttcatccaccgcatatgcaggaacgccggtacgttctattaacgctttcacgaccagactaccaagttccacggcggaatgacccgctaacgcaccacgaaagcagccgataggtgtccgtaacgccccgacaatcacaacgtctttcatcacaacctcgcaccaattaacagtgcaatagtaaatgattgttaattacagttatcttaattgtttaaaaaaagtgatttttatcacaaaggaaatatgcctgagcagcagtcagagacataactggcacgtaaggtttgcaaccactaacccaccaatagaggggtagatagggcgttaatctcccatacttaacctggtttatggtaaattgccctccattttgtttaatttgtagatgatacgttcagataatgtctaatatttggtctaaagaagaaactctgtggagtttcgcgctctacggcacagccgttggtgcaggcacgctcttccttcctattcagttaggtagcgcaggggctgtggtcctgtttattactgctctggtcgcctggcctttaacatattggccacataaagccttgtgccagttcatcctcagtagtaaaacaagtgcaggtgaagggataacgggcgcggtaacacactactatggcaagaagattggtaatctgattaccacgctgtacttcatcgccttttttgtcgtcgtgttgatatatgcagtggcaattaccaacagtcttacggaacagctggcaaagcatatggttattgatcttcgcatccgtatgttggtgagtctgggtgttgtattaattctgaatctcatttttctgatgggacgtcatgccactattcgggtaatgggatttttggtattcccattgattgcctatttcttatttctttccatttaccttgtcggtagttggcaacctgatctattaacaacccaggtagagttcaatcagaatacccttcaccagatatggataagcattcccgtgatggttttcgcctttagccatacgcccattatttctacgtttgccatagacagacgtgaaaaatatggcgaacacgctatggataaatgcaaaaaaattatgaaagtcgcttatctcatcatctgcataagtgtactgttctttgtctttagctgcctgctttctattccacctagctatattgaagctgctaaagaagaaggggtcaccattttaagcgcgctttctatgctgccgaacgccccagcatggttgagtatttccgggattattgtcgcagtagttgcgatgagcaaaagtttcctgggtacgtactttggcgttattgaaggtgccacagaggtcgtcaaaacaacactacagcaggttggtgtaaagaaaagtcgtgcatttaaccgcgcactaagtattatgttggtaagcctgattaccttcattgtttgttgcattaacccgaacgcgattagcatgatttacgcgatcagcggcccgctcattgccatgatacttttcatcatgcctacgctgagtacgtatctcatcccggcgcttaaaccctggcgttccatcggaaatctgattacgctgatcgtgggtatcctgtgcgtaagcgtaatgttctttagctaatatcagttgtggatggttcaaaattgctacaattttgaaccattccatttttcataatattcatttgttattattccaccctatcacttctctcgtcatatcctagtattatcagttagttaaacacacaaagagatctgaacatcttaaataagactatttaagatgcataacttagattcgcaagatatcttctggtcattcaaaaacaatttgcgatatagatattcttataccatgagatagttatctggaccgctctcaaccatgcaagattaaatcagtgaaacataatcatatttgataacgagaaatgcatttttaaatgccttactcagaattatagcaaatacagattaatcgcaatttttcccggcaaaattacaaaatcatggtgtattgacatcatcaataaccaatgaaattatgcaattatatacggatagggaggttcttaacatggggctttgtagtcgttataaaagtcttacatgcaatagttgcagtatgcattgccaaataatgccagaagagagtccgcgtttgcagtattgcgcaaacagctgtttttgtatgtggcccgaagaaagtagttattttaatcgtggtgtggtagaaggtatcttaacaaaaaaccacaatgcgagattaagcggatatatttttgtcgattttagtgtaagttttttacgtctattccttgaaaaagactggattgactatcttgcaagtactgacatggggattgttttagtcagcgaccgcaatatgcaaagcttagctaattactggcgaaaacacaacagtgcaatatctgctgtcatatataatgatgatggtcttgatgttgccaatgaaaagatcagacaactatttattggtcgttatttaagttttaccggaggtaacacattaactcagatggaattcaccataatggggtatatggtttctggttataatccatatcagattgctgaagttctggatatggatatccgtagcatctacgcgtacaagcaacgaatcgaaaagagaatgggtggtaaaataaacgaattatttattcgtagtcatagcgtccaacattgatactcaacgaccagccagaatcatactctgtttatacgggcatttattgaaatgtccgtattttataaataggccgtcccctcaagagtaaacaccatagtatttaaaaccatcacacgaaaaattcagaagcattacgaaatatgaatttacaaacaatagtggcataaatgttaaccatgttaatttacgtaaagttttacgttgcaacattaaagcctcatttcaatcatcatgataaatataaaattaatatatatttatgccgtaaataccaatatacttagcaaactatgtgatctccatttcgattgatttagtgtttattgacgtatgtactggattattaacgataatatcgagttctggcctgagcaccgaaaattaataagcgtacataacgccgatcttaacgtcgttctgacaacgccagccagtcgatgtttaagtcttctacttgaagcttttcctgatgtggttgcacaacaagattttttcaccagagtctgggaagaagaaggtatgcgtgtgcctactaacacgttatatcagaacatatccattatcagacgcggatttcgcgctgttggtgatactacccacagcctaattgcaaccgtgccgagaagaggattcaagatccataatgacattaacatacaaaatcatgtaataaacagcagtacagacgcacatacacacaatgccccacctgccataaaagttaatgcgggatacaaagagagcattggtggcgcaaagaatttcaataacaaaatcctcaaacatataaaaagtcatctaattatgttgagcgcatttgtcataggcgcatattctgcatattggctatggaataataatcaaccgaagccatttttcaaggattacaagactgttgcggaaattaatggctgccattttaatgtaacagaagatacaattgatgggttgaaagagttcgataaatataaaacacggatactggatagcgggattaactgtaaaaaacatccgtggttatacttccctcttgcaaaatccagtccggggatgattgttatggcatgcaataaaaactataaccaacatgaagtggcaaactgtttaaccctgtcttaccgtgaggttaatcgtgattgattataaaaaaaacttattatttattttagtttttatcagtgggtttattctcttcactgtctattcttacactgcagaaaaaatgatatataacgaaacatgcactgcaaattgggtaatttttaatgaccagggacgagcaaatcttaccatcgactttatgtataacaaaaaaaataaaacaggaactgttgcgttgagtggaacctggcaacaaggtaacagagaaagtaaaagtatacggcgaaatattgaatacacatggattgaaaactatgacacagcccatttaacaagtaagaaagttaataagtttgagattatggatcaagttgatgatgatagacttgcacaacttattcctgatttttatgtctttccagaaaaaagtgtaagctataatatactaaagcaaggtaagcatgcttttattttgagcattggtaacagagcaataatgcattgtgcaaggtaaactaaaatagataacaaaaagatggaacctcgttaatcataaaacaataaaattaaatattctcgcagtatatggcagtctaaagcatcaaagatttgatcaacatctttcattttagacatctccttgcaatgtaaaatatcatgtatcaacaacatctggtgcaaatccaactgtcgaactcgacattcatcttagctcgattattattccttcgtacagtgcttgtaaacaatacagaaagaggattattaagaaccagtttactcagactatcaatagaggaaaggactaacgtttctttaaaagaattgatttcatcatctgttaaactaaactcatcattgacagatcgactgatataactgtttttaactttactctttacgttgactttattgacagaattaacattcacatatctactatttaatgtccaacttgttgtttgcgtgagaacattctcagcattaaggaatttttttaacggaatccttggtttctttttgctgtcgctatttacaatatcatgcatatagaccatttcatgaatctggctaaattcaatgtccattgtatacctcacatttttaccgtgactcgatgttactgttcaataatcaccttccatcaatactaaaattaatacccctaatgtgccgataacaaatatagtcattctacgtaacgtctccataaggtgatatttgacattatcagaagctgcgaattcggattttgctctaatcaaatgagagaaatgtaaaatgaagccacgaaatattaataatagcctaccactgcaaccattagttcctgatcaggagaacaaaaataagaaaaatgaagagaaatccgttaatccagttaaaatcacaatggggtctggtttaaattatattgaacaagaatctcttggaggaaaatatctaacacatgatttgagtataaagatagcggatatttctgaagagataattcagcaagcaatattatctgctatgagcatatataaatttagcataacagatgatttaatgagtatggctgtaaatgaactcataaaactgaccaaaatagagaataatgtagacctgaataaattcactactatatgcacagacgttctatccccccgcgtcaccagacataataaagaaaaaaacaaacgacattctacccttctcaaaaatcccctttttaattttcattgaaaaaatggcaattgatactatgaatccaggtcatacacattaaggcatttatgtaatgtcgtaattaagataactaataaggtgaatattagtaaaacaactaatgatgttattagtttgtagtgaacagtacttttaccaataatgaaaaatataccataagcaatgcaagcttaaaactcataatttaaaaaagataaatataaaaatatcaatgagtcaatcaataataatttggcatcacgagacacatcacagaggaatattatgagcacagaaacaattgaaatattcaataatagtgatgaatgggcaaatcaactaaaacacgcattaagcaaaggagaaaatctggcattactacatggtttaactcctgatatccttgatagaatatatgcatatgcattcgactaccatgaaaagggtaatataacggacgcagaaatttattataaattcttgtgcatttatgcgttcgaaaatcatgagtatctaaaagattttgcaagtgtatgtcagcccaaaaagaaatatcaacaagcatatgacctttacaaactaagttacaattacttcccgtatgatgactatagtgttatttatcgtatgggtcaatgtcagattggggctaaaaatatcgataacgcaatgcaatgtttctatcacattattaacaattgtgaggatgatagtgttaagagtaaagcgcaggcatatattgaactcttaaacgataatagtgaagataatggctaagcattacaatcatttggttaaatttgctggttatagtgcagttaaccactataaccagcacctcttatgttttcttaaatcagcatcttaaaacagttaagagcatactataaatcattatttttcaatgcgttagagaacaatctactttatcaaaattgaataaggctatttcagattacatcactgaattcctaagataaattagtgaacacaaccatagatatgtcaaatgtaatttcctgtagcgttaatgacacataaatatgaatagccataatttctattgcttaagcaggatgcaagaaaccaattttttcatagaggttaactaatggacttagaaaataaattcagttatcattttcttgagggattaacgctcacggaagatggaattcttactcaaggaaatgagcaagtttatattccacagaaagagttaggtgtattaatagtattacttgaatccgctggtcatgttgtactgaaagatatgatcatcgaaagtgtatggaaaaatattattgttagtgacgagtccctgacaagatgtatctattctttgcgctgcatttttgaaaaaattggctatgatcgttgcatagaaacaatctaccggaaaggttatcgtttcagcgggcaggttttcaaaactaaaattaatgaagataatactagtgactattccatagctatattccctttcactactagtttgaatacactggatccattaatacttaatcaggaattagtgcaaatcattagtaataaaaaaatcgatggtctctatacctatccgatggctgcgacaaatttttgtaatgatcacatatctcaaaatagtttcttgagcagattcaagccagattatttcgttacaggaagaataaaccagaataatgcagtgaacactttatacattgagttgatcgacgctaaaaaccttttcctcatcgccagtaatcatctccctgttgatgaactacataatacaagtcaatttattatagataatatccttcaaacggtacataaaccagaacgatctgtaagattagctaagcaggaccaaggatataagaatcattatttaagtgatgaaatgttagccggaaagaaagaactttacgacttcacccctgaaagcatttacagggccatgactatatttgatagattacaaaataaaagtgatatacagacgctaaaaacagaatgttattgccttctagcggaatgccatatgtctttggcacttcatggaaaaagtgaacttgaacttgctgctcaaaaagcattagagcttttagattatgtaagtgacataaccactgtcgatggaaaaattttagctattatgggactgataactggtctgtctggacaagcaaaagtatctcatatcttatttgaacaggctaagatacacagtactgatatagcctctctctactactatagggcactagtccactttcataatgaaaaaattgaagaggcaaggatttgtatagacaaaagtctacaactcgaacccagaagacgaaaagcagttgtgataaaagaatgtgtagatatgtatgtgcctaacccgctcaaaaacaacattaaactctactataaagaaactgagagtgaaagccatcgagttataattgacaacattttgaaattaaagcagctgacgagaatttgtatgcgataaatttttattgacgcaattttattatttagatgtatgcaacttgttatttaaacaacagagataaaaatatctaagatattcaccttattgcaagatatttaaaatgctctagagttaaaagtatgatgtaaagaccattggcctggacaattaaaaaagggagctttatgactaatccaatcggtatcaataatttatctcaaagtagtaatatagcgaatgcaacgggtgatgaagtcgtaagtttagataaacacatcaacaccagtgctactgatacagatcaaatacaagcatttatagttagtacatggatggcgccttttcaaaatgatatgtatagtgaagataatcctatcagtccttactataaaattgagtggtaaacgattgaccaaataaatcataacgagatacttttataatagtatctcgttcctttcattcaatcctcacacatgaaaaaatatgcgctcaccaaaagttaaattcttaaccatcttcacgttttgtatatttattacaaaaatgtctttcgccagcaactcttgctctaatgaagcaggaacaatgttcagaatcgaaccaaatttaattaaagctatcgctcttgttgaaagcaatctaaaaaaggatagcataggcaagaacagagataagaataacaatataaagagtttagattattggttaatgcagataaaccagatgcatattcccctgttaaaaaaacgtggaataataaaagatgaacgagatttgttagataacccttgtctgaacattaaaataggaaccgagattttatataaccattttagtcgttgtggagtaacgtggcaatgcctggggacttataatgcgggttttgcaatggataaccaaaaaaagagacagcaatatgccccaaaatatatattgtatataccaggcttaatgaactaaacaatcgtaaggcttcagcaaaatgagcctaaagcctcttttttttatatagtgcaaacacccatacgtaaagctgttttgatcaactcgataccactgtgaacatctaatttcttcatgatattgagtctatgagtttcgactgttttcctgcttaactgcaagaaattagcgatttctttgtttgttttaccatcagctatgagttgtaatatttcactctcacgatttgtaagttgattatcagaggaatacctggaagatattttttcacaatccatatgtacactatcaaaataagtgtaaccattactaatgctatcaatagcacgatttagtttcgccgggtgactggttttccatacgcatcctttcgcacctgcttcaagcaattttatactatcaatatacggcatctttgctacaaatgtaataatatgagcatctatcttatggcttttaacccattttacgagttcggcccccatcattccacctgcaaattctcctaaaataaatatttaggctgtagatttgttacactccgctatagctttcttcagatctttatagcccacttatttaacaacttgaaaataaggtgttttacctgggttgttacaaaaggattgcattgcgtaaacgctttttatttacaacaaaatggggaagtattacggcgaagataaattggagcgggcgaagggaatcgaaccctcgtatagagcttgggaagctctcgttctaccattgaactacgcccgcttcgagatgcgtaaggcattataaaccttacgctctccttagcaagtgccacgctgctgactgctgattaattcgccatcagcattttggcttgctgccctgaggcggcaagtaacgtagcggatcaattgccgttgcacggtaacgaatctggaaatgcaggcgaacagatgccgcatccgtgctccccatagtggcgattttttgcccagccttcacgctttgcccattatttaccagcatcgtgtcattatgggcgtaagccgtaatgtaatcttcactgtgtttaatcatgatgagattaccgtagccacgcagctggttgcccacatacaccacctttcctgcacccgcggcgtaaataggtgtaccccgtggagcactgatatcaatccctttattgccgccatctgctgtgctatacggcatgataactttccctgtcgttggccataaccaacaacgttgccctactggcggccaggaacttttcggtaccgcactactcggtgtaacgcttgcggttttggtcgtacttttggcggtacttttacgtgtaatactgctacttttcgccccacccagttttagtttctgaccaacttcaatggtgtaagggggggaaatgccgttcagtcgcgccagttcttttacgctggttcccgtggtgcggctaatacgatatagcgtatccccccgtttcacggtgtaaacggagccggaatacgttcctgtatcggaacttttgctaccgctacagcccgccaaaagcagtccaacgcttaacaacatcacgatacccagagattttttattcaggcgtcccgcactcaaaatctttcctcgcttaaaaaacaagacgccttatcatagcagccagcctcttgatacccaatctcttgcttctggaaaaacgtggtaatagagaaagaggttaatttcatttggcaaagggaagtatcatcagcaaaatattcgctgtagaggtatcgaacttcctgactttttaccctatttcccatcctgatgcgtaataatcccaatttatcacattgattttatcgccactcatattgatacgtatcactgcccctattcagagtcctgtttcgtatcatatctgtgtttttttaacgtcatcacacttcctacctcccctaacgcttatcgtcgtttctggcgtaaatcttgcctgcttagactaaatctttgccataagaaccaaatgttcaaatcgaggggatttctatggaagcgcgggaagcaaccgctacgggtgaatcatgcatgcgcgtcgatgccattgctaaggtcaccgggcgggcacgatatactgacgattatgttatggcgggcatgtgttatgcgaaatatgtacgtagccctatcgcacatggttatgccgtaagtattaatgatgaacaagccagaagtttgccgggcgtactggcgatttttacctgggaagatgtgcctgatattccattcgctacagctgggcatgcctggacacttgacgaaaacaagcgcgataccgccgatcgcgcactgctaactcgccatgttcgtcatcatggtgacgccgttgccatcgtcgtggcccgcgatgaactcacggcagaaaaagcggcgcaattggtcagcattgagtggcaagaattacccgttatcaccacgccagaagcggcgctggcagaagacgctgcaccaatccataacggtggcaatttactgaaacaaagcacgatgagcacgggtaatgtccaacaaacaatcgatgccgccgactaccaggtacaggggcactatcagacccccgttattcaacattgtcacatggaaagcgtaacaagcctggcgtggatggaggatgacagccgaattaccatcgtttccagcacccagatcccgcacattgttcgccgcgtggttggtcaggcgctggatattccctggagttgcgtacgagtcatcaaaccatttgtcggtggcggttttggtaataaacaggatgtactggaagagccaatggcggcattcctgaccagcaagcttggcggcattccggtgaaagtttcccttagccgtgaagagtgtttcctcgcaacccgtacccgccacgcttttaccattgacgggcaaatgggcgtgaaccgcgacggaacattgaaaggttatagtctggatgttctgtctaacaccggcgcttatgcatctcacgggcactccatcgcttctgcgggggggaataaagtcgcttacctttatcctcgttgtgcctacgcttacagtagtaagacctgctataccaacctccccagcgctggtgcgatgcgtggttatggcgcgccacaagtcgtatttgccgttgagtctatgcttgatgacgccgcgacagcgttaggtattgatcctgttgaaattcgtttacgcaacgccgcccgcgaaggagatgctaatccgctcacgggcaaacgtatttacagcgcagggttgccggagtgtcttgaaaaaggccggaaaatctttgaatgggaaaaacgccgtgcagaatgccagaaccagcaaggcaatttgcgccgcggcgttggcgtcgcctgttttagctacacctctaacacctggcctgtcggcgtagaaatagcaggcgcgcgccttctgatgaatcaggatggaaccatcaacgtgcaaagcggcgcgacggaaatcggtcagggtgccgacaccgtcttcagccaaatggtggcagaaaccgtgggggttccggtcagcgacgttcgcgttattagtactcaagataccgacgttacgccgttcgatcccggcgcatttgccagtcgccagagctatgttgccgcgcctgcgctgcgcagtgcggcactattattaaaagagaaaatcatcgctcacgccgcagtcatgctacatcagagtgcgatgaatctgaccctgataaaaggccatatcgtgctggttgaacgaccggaagagccgttaatgagcttaaaagatttggcgatggacgctttctaccaccctgaacgcggcgggcagctctctgctgaaagctccatcaaaaccaccactaacccaccggcgtttggctgtacctttgttgatctgacggtcgatattgcgctgtgcaaagtcaccatcaaccgcatcctcaacgttcatgatagtgggcatattcttaatccactgctggcagaaggtcaggtacacggcggaatgggaatgggcattggctgggcgctatttgaagagatgatcatcgatgctaaaagcggcgtggtccgtaaccccaatctgctggattacaaaatgccgaccatgccggatctgccacaactggaaagcgcgttcgtcgaaatcaatgagccgcaatccgcatacggacataagagtctgggtgagccaccaataattcctgttgccgctgctattcgtaacgcggtgaagatggctaccggtgttgcaatcaatacactgccgctgacgccaaaacggttatatgaagagttccatctggcaggattgatttgaggataacatcatgtttgattttgcttcttaccatcgcgcagcaacccttgccgatgccatcaacctgctggctgacaacccgcaggccaaactgctcgccggtggcactgacgtactgattcagctccaccatcacaatgaccgttatcgccatattgttgatattcataatctggcggagctgcggggaattacgctggcggaagatggcagcctacgtatcggctctgcaacgacatttacccagctaatagaagatcctataactcaacgtcatctcccggcgttatgtgctgcggccacgtccattgctggaccgcagatccgtaacgtcgctacctacggtggaaatatttgcaacggtgccaccagcgcagattctgccacgccaacgctaatttatgacgcgaaactggagatccactccccgcgcggtgttcgtttcgtcccgattaatggctttcacaccgggccgggcaaagtgtctcttgagcatgacgaaatcctcgtcgcctttcattttccgccacagccgaaagaacacgcgggcagcgcgcattttaaatatgccatgcgcgacgcaatggatattagtacgattggctgcgccgcacattgccgactggataacggcaatttcagcgaattacgcctggcatttggtgttgccgcgccaacgccgattcgctgccaacatgccgaacagactgcacaaaatgcgccattaaacctgcaaacgctggaagctatcagcgaatctgtcctgcaagatgtcgccccgcgttctagttggcgggccagtaaagagtttcgtctgcatctcatccagacgatgaccaaaaaagtgattagcgaagccgtcgccgcggcggggggaaaattgcaatgaatcacagcgaaacaattaccatcgaatgcaccattaacgggatgccttttcagcttcacgccgcaccaggcacgccgctcagcgaattactccgcgaacaaggactgctaagtgtcaaacaagggtgctgcgtgggtgaatgtggtgcctgtacggtgttggtcgacggcacagcaatagacagttgcttataccttgccgcctgggctgaaggaaaagagatccgcacgctggaaggtgaagcgaaaggcggaaaactttctcatgttcagcaggcttatgcgaaatccggcgcagtgcagtgcgggttttgtacgcctggcctgattatggctaccacggcaatgctggcgaaaccacgcgagaagccattaaccattacggaaattcgtcgcggactggcgggaaatctttgtcgctgcacggggtatcagatgattgtaaatacagttctggattgcgagaaaacgaagtaaaaggatatccggcctgaattcaggccggattcactgaggttatgtgtttaacaactcatatttcttaatcttgcgatagagcgtagcaatgccgatgcccagttcatcagcaacttgcttcttgctgttatgacgactaagcgcctcgcggatcatttgcttttccatctcctccagcgccgtgccgcccgcatcatcgagactcaggtgcgcctcactgacctctgttacatcactttgctccgttgtgccattattcagcagatttggcggcaatagcgtgctgtcgataacttcaccactaggaaccacgttaaccagatattccatcaaattgcttaactcgcgcaggtttccgggccaacgatgcttacgcaatatttcgacgacatcgggagcaatgccaggataaacgcttcccagacgacgggtatgcagatgtaaaaagtaatgcaccaatagttcaatatcttcctgacgttcacgcagcggtggcagagttatcgggataacattaagtcggtagaagagatcttcgcggaatttaccttcggcaatgaactgggccaaattctgattagttgcagaaatgatgcgaatgtcgacttgtattgggctactggcaccaatcggcagaatttcacgtgcctcaatagcgcgcagtaatttagcctgcaacattaatggcatatcacctatttcatcgagaaacagcgtgcccgtattcgccgcctgaatcaaccctgttttaccgttggcagaagcgccagtaaatgcacctttaacataaccgaacagttcgctctccagaagctgctccggaatcgcggcacagttgatagcaataaagggtttattccgtcttccgctcaacttatggattgcacgggcgacgacttctttacccgtgccgctttcaccaaccaccataacgctggatgggctgggtgcaatacggctaatgagtcgttttaattgccgcataacacggcactcgccaaccaattgttcaatatgcggttcatcaggtgcatttgctacagaaaaactggtatggctttggtgaaacgccattaaaaataattgtcggccctgaatgttatgcaattgaccaatgattaattcacttttatcgtcccaactaacaatatgctgcatatgtccatgggtaaaattactctcaaatgttaatggtctgaaacggataggtttcccaataatattattttgcacaacaccaagtgtttttaaggcagtctgattaacaaactgaacccgattttcatcatctacaactaatacgccctgatccatattatcgatcatggtcgcaaatattttactgatgttatctcctggcccctgatcctccagaagtttgctaacaaaaatggtggatatatggcgaacataatcagaaaattcgcgtaaattatcactgatatgctcttgttgctcgtgggtaacggcaatcaaacttatcaccccaacacaacgatcctgtaaaatgacaggcgtacccagaaatgctttttcgcggcaattttctttactatcgcaaccttcgcaaaggggatcgaagcgagactgtgtcacaactttttcagttttcgtttccaggacgtggcggagcaggcgactgttgccgctcaactggcgaccaagaaacttcccatacgcgcccgttccggcaacgcgacacaagttttcatcaacgatctcaacctcaagctgcaaaaacgctggcaagcattctggcaaaacgctgaattgtcggttgaatttgcatcaatacactctgcgtagtagcaagctccatagctttaccttccagacttacttaaaagtcgatcattgaagacgttgatggttcacagatcatgatgatattaactcaggcgaaattggctttgataaaaacataagatttttatcattttctaatgaaattatggaagagatatcacatttctatatcaatatgagaattacggcggtgagtttatcaaactgaagagagatagcctgcccctttatcttatttctgatacttagcagcaaataaataacgcgataaaaaaagccaaacgttttcgtattttacaaacaaccagaagctggcatcaatttgtgatcaaccccacacattatccgtcaaattagtcttttgcagccgcgcggataattctggcacacttattgttagtcccaggtatagctgtgaaaacaccaatcactttggcaagtcacagtgaaataaaccactttgcctgtcattccactaccgggactttatgatgaaaactgttaatgagctgattaaggatatcaatagcctgacctctcaccttcacgagaaagattttttgttaacgtgggaacagacgccagatgaactgaaacaagtactggacgttgccgcagcattaaaagcactgcgtgctgaaaacatcagtaccaaagtctttaatagtggattaggtatttccgtattccgcgacaactccacccgtacccgcttctcttatgcttccgcgcttaacctgctcggccttgcacaacaagatctcgacgaaggcaaaagtcaaatcgctcacggcgaaaccgtgcgtgaaaccgccaatatgatctccttctgcgccgacgctattggtattcgcgacgatatgtatctgggcgcaggcaacgcctatatgcgtgaagttggcgctgcacttgatgacggttacaagcagggtgtactgccacagcgtccggctttagtgaacctgcaatgcgatattgaccacccgactcagagtatggctgacctcgcgtggttacgtgaacactttggtagtctggaaaacctgaaaggtaaaaaaatcgccatgacctgggcctactctccaagctatggcaaaccgctctctgtaccacaaggcatcatcggtctgatgactcgcttcggtatggatgtcaccctggcccatccggaaggctacgacctgatcccggatgtggttgaagtggcgaaaaacaatgctaaagcctccggtggtagcttccgtcaggtcaccagcatggaagaagccttcaaagacgcagacatcgtttatccgaagagttgggcaccttacaaagtgatggaagagcgtactgaattgctgcgtgcgaacgatcacgaaggcttaaaagcactggaaaaacagtgtctggcacagaacgcgcaacacaaagactggcattgtactgaagagatgatggaactgacccgtgatggcgaagccctgtacatgcactgcctgccagctgatatcagcggcgtatcctgtaaagaaggtgaagtgactgaaggcgtattcgaaaaataccgtatcgctacctacaaagaagccagctggaagccttatatcatcgccgcgatgatcctgtcccgtaaatacgccaaaccaggtgcactgctcgagcaactgctgaaagaagcgcaagaacgcgtgaaataacccctcgggccgatcagctggtcggccctctatttccagaggccaaaaggataggatatgtccgttttcagtttgaagattgatatcgccgataacaaatttttcaacggcgaaacaagtccgctctttagccaaagccaggccaaactggcgcgccagttccaccagaaaatagctggttatcgcccaacaccgctttgtgcgctggacgatctcgcaaacctttttggtgtgaagaaaattctcgtcaaagacgaaagtaaacgattcggtctgaacgccttcaaaatgcttggcggtgcgtacgccatcgctcaattattgtgtgaaaaatatcatcttgatatcgaaacgctgagttttgagcacctgaaaaatgccatcggcgaaaaaatgactttcgcgaccaccaccgacggcaaccacgggcgcggtgtggcgtgggcagcacagcaactcggacagaatgcggtgatttacatgccgaaaggttctgctcaggaacgcgttgacgccattctgaacctcggtgccgagtgcatcgtcacggatatgaactatgacgataccgttcgcctgaccatgcaacacgcgcagcagcacggctgggaagtggtacaggacacggcatgggaaggttacaccaaaatcccaacctggatcatgcaaggctacgcaaccctggcagatgaagccgtcgagcaaatgcgtgaaatgggcgtaaccccgacgcacgttctgctgcaagccggtgtcggagcaatggccggtggtgtgctgggttatctggtcgacgtctatagcccgcaaaatctgcacagcattattgttgaacctgacaaagctgactgtatttatcgctccggcgtcaaaggcgacatcgtcaacgttggcggtgatatggccaccatcatggcaggcctggcctgtggcgaacctaacccgctgggctgggaaatcctacgtaactgcgccacccaattcatctcctgccaggacagcgttgccgcattaggtatgcgcgtgctgggtaatccgtacggcaacgacccgcgcatcatctccggtgaatccggcgctgtcggtttgggcgttctcgcagcggttcattatcacccgcaacgtcaaagcctgatggaaaaactggcgctgaacaaagatgccgtggtgctggttatcagcactgaaggcgacaccgacgtgaagcactaccgcgaagttgtctgggaaggcaaacacgctgtagcaccttaatcaccctattggaactgctccctgcaaaacggggagtaaaaaatctggagaaaaataatggctaagaatattccattcaaactgattcttgaaaaagcaaaagattaccaggcggatatgactcgcttcctgcgcgacatggttgctattcccagtgaaagctgcgacgagaaacgcgtagtacatcgtattaaagaagagatggaaaaagtcggcttcgataaagttgaaatcgacccgatgggcaacgttctcggttatatcggccacggcccgcgtctggtggcaatggacgctcatatcgataccgtcggcattggcaacatcaaaaactgggacttcgatccgtacgaaggcatggaaactgatgaactgattggtggtcgcggtacttccgaccaggaaggtggcatggcctctatggtttatgccggtaaaatcattaaagacctcggtctggaagatgaatataccctgctggttaccggtacggtgcaggaagaagactgcgacggtctgtgctggcagtacattattgaacaatccggcattcgcccggaatttgtggtcagtaccgaaccaaccgactgccaggtataccgtggtcagcgcggtcgtatggaaattcgtattgatgttcagggtgttagctgccacggttctgcaccagaacgcggtgataacgccattttcaaaatgggtccgattcttggcgaattacaagaactctcccaacgtctgggttatgacgaattcctcggcaaaggcaccctcaccgtttctgaaatcttcttcacatccccaagccgttgcgctgtagcagacagctgcgcagttagtatcgaccgtcgtctgacccggggcgaaacctgggaaggcgcgctggacgaaatccgcgccctgcctgcagtacagaaagctaacgcggttgtttctatgtacaactacgaccgtccgtcctggactggcctggtttacccaaccgaatgctacttcccgacctggaaagtggaagaagatcacttcaccgttaaagcactggtgaatgcctacgaagggctgtttggcaaagcgccggttgttgataagtggaccttcagtactaacggcgtatctatcatgggccgtcacggcattccggtgatcggctttggcccgggtaaagaacctgaagcgcatgcacctaacgaaaaaacctggaaatctcacctggtgacctgtgccgcgatgtacgctgcaatcccgttaagctggctggcaacagagtaattactcttcacttattcccctccggttcgccggagggtttttggagtttgctatgcgcgtattgatcaaaaacggcactgtcgttaacgcagatggacaagccaaacaggatttgctgattgaaagcgggattgttcgccagttgggcaacaatattagcccgcagctcccgtatgaagaaattgatgccactggctgttacgttttccctggcggcgtggatgtccatacgcatttcaatattgatgtcggcatcgcgcgcagttgtgatgatttttttaccggtacccgcgcagctgcgtgtggcggtacaacaaccattattgaccatatgggatttggcccaaacggctgtcggttacgccatcaactggaggtttatcgtggttatgccgcccataaagcggtcatcgattacagctttcacggtgtgatccagcacattaatcacgcaatcctcgacgaaatcccgatgatagtcgaggaaggactgagcagttttaaactctatttaacctatcaatacaaactcaacgatgacgaggttttgcaggcattacgccgcttgcatgaatccggcgcgctgaccaccgtgcacccggaaaatgatgcggctatcgccagcaagcgggcggaatttatcgccgcagggttaaccgcgccgcgctatcatgccttgagtcgccctctggaatgcgaagcggaagccatcgcccgcatgattaacctggcacaaattgccggtaacgccccgctctatatcgtgcacctgtctaacggcttaggtctggattatctgcgtcttgcccgtgcgaatcaccagccagtctgggttgaaacctgcccacaatatctcctgttggacgaacgcagttacgatacagaagatggcatgaagttcattcttagcccaccgctgcgtaacgtacgcgagcaggacaaactgtggtgtggcatcagcgatggtgcgattgacgtggtggcaaccgatcactgcaccttcagcatggctcaacgcctgcaaatttctaaaggcgatttcagtcgctgcccaaatggcttacccggtgtggaaaaccgcatgcagttactgttttccagtggcgtgatgacgggacgtataacaccggaacgctttgttgaattaaccagcgcaatgcccgccaggttgtttggcctgtggccgcaaaaaggattattagcgcccggttccgacggcgacgtggtgattatcgacccacgtcagagccaacaaattcagcatcgccatctccacgacaacgccgactacagcccatgggagggttttacctgtcagggcgcgattgtcagaaccttatcccgtggtgaaacgattttctgtgacggcacctttacaggcaaagccgggcgaggtcgtttcctgcgacgcaaaccgtttgtccctcccgtgctctaaccactgccagggatctatacacaatcaagaatgatgagtgaggaaaaatgagtaagaaaattgttctcgccctgggcgggaatgcgctgggcgatgacctggccgggcaaatgaaagcggtaaaaattacttctcaggcaattgttgatttaattgcccagggacatgaagttatcgtcactcatggtaacgggccgcaggtgggcatgattaaccaggcctttgaagctgccgcaaaaactgaagcgcacagcccaatgctgccgatgtctgtctgtgttgcattaagccagggttatattggttacgatctacaaaacgctttaagagaagaactgctttctcggggcattaataaacctgtagcaacgctggttactcaggtcgaagtcgacgctaacgatccggcattcctcaacccgaccaagccgatcggtagcttctttaccgagcaagaagcagagcaactgacaaaacagggttacactctgaaagaagatgctggtcgcggctatcgccgtgttgttgccagcccaaaaccggttgatatcattgaaaaagaaacggttaaagctctggtagatgcaggtcaggtggtgatcaccgttggcggtggtggtatccctgttattcgtgaaggtaaccatctgcgtggtgccagcgcggttatcgataaagactgggccagcgcccgtttagcagaaatgattgatgccgatatgctgatcattctgactgcggtagaaaaagtggccattaacttcggtaaagagaatgaacagtggctcgatcgcctgagtttaagtgatgctgaacgctttatcgaagaaggtcattttgcgaaaggttctatgctgcctaaagtggaagctgccgccagctttgctcgctctcgcgcaggtcgtgaagcactgattaccgtattgagcaaagcgaaagaagggattgaaggcaaaacaggaacggtgatttgtcagtaatttaaaggccgggtgggtaataccatccggccaaagattgtcaagtaagtgcgctttgttgatgccggatgcggcgcgagcgccttatccgtcctacaaaacatcgcaaattcaatagattgcaatgcacttgtaggcctgataagcgtagcgcatcaggcaatttggcgtttgtcatcagtctcaggccgggtgggtaataccatccggccattttcatttaagccacttccagcacttcttttgtcgctttcacgccctgatgcatcaacatcattaacgcctcaagtacgccgccgccaatcgcccgggctttatcagaaacgctggtgaaatcagcggtttcaccacgaggatcgatatcaccaattttaaaaccaccaaccactgccaggccgtcgttcaacaagccacgcaccatccccgtcaacggtgctttaatttcatgctcaccaatccaggcaatcacatcgccctctttcaccagatcgcctaatttcacgttggatcgcataatgcctgcagcaggagcacggatcacccgtcgggtggtatgccccataatattgccaggaacaccggtattctcctgcgcacaaccagagtaaatcacctgaccgagccagtgcccgcgatttgtttcaattaccgcatgacaatccttcccagcagtaaagcccggcccaagcgcgattgttactggtgccatatctgcccgcgttcccaaattctgtttcgccagaatagcgtccaccacgcaaagcggtttcagttcatcaagcaaactacaggcgggatctaccatcacaggaatgaatccgcgttcggtaagtttcatcgcttccgcagagctggttgccaggcgagcagtgacgccttcgaccgtcatttcgccatcgaacacggcctgggcaaacgccacggtacaacgaatcactgtcggtttttccacttccagcatgatcactttaaaacccgcatgatacagacgtagcgccacaccactggcgatatctcccgcaccgcgaatcaccaccagctggtgtccggaaggatgagaaggtttcatcatcagcccacccggcgcgttatttttcacctgtaatatttctgccagcacgctgatggcgatctcctgcggcgtttccgcacctatgttgtaaccaacgggcgcatgtaaacgggcaatatgttcttcagccacgcctttctcacgcaattgacgcaggaaaagctgaaccttgcgacgacttgccagcaaccccaaccatgcaatgggctgttcaatgagtttgtcgagggcttcacgatcctgattattcgtggcaatcaggacaaaattatcagggcgaatatccagtgcttccactgccgcaccaaagctctcagcatggagaagcgtggtacttggtgggaatagttcaggattgaggctttcgcgataaatatcagcaacggcaatatcaaatcctaatagcgccgcactctgggctatcgcccggttgacatgccccgcgccaatcaacaccagacgtggacgcataccatggacgctgataaatacactcattgcacctccacaatcactcccgacagcatccgcaccgttacgagccatacgtccatggaataatcgcggcttacgttcctgcaatgcctgaaggctctcttcaatcaccttccgctcaaccattccgccaccaattgtaccgacgatagaaccatcggcgcgcactaacatttgtgcagaatggcggggagtgctgcctcggctatcaacaatttgcgccatagcaaacggacaattttgctcttcgagttttgcagcctctgtgaaaatattcataccaacctcaatggatatcctttcagtaacccggaatacccgggccgttaattcacaaatctgcgcgcgattgcaggatgttcttgtatatcgcccagccagattgcctctacgtcgtgttgttgcagcggttgaaggagctcgctttgtgcaatcgcattctcacattgagaaaaacggttaatgaaccagactcgccgacaaccttgcggtacgtttttaaacgccccctgagggtggcgaaccagcgcaacgagatcgctcagttgcaaggttgcatcaggtgttaacccggtaatatcagcaaactggctccagcgatggacattttctgtgctcactttcgcgcccaaagtatgtcctcccatcacagcaatcacgcagcaactgcttttgggtatgcaaggttcgtgctcatcaggcgcttttaacggcattccacggctgccatctgcttcaatgagaattacgtcacactctggtcgttgcaccagtgcatcaatcgcttctggcgtaaatccctgcacttttccctggttcgctttccagctgtgaaaacaaaaactaatgggggatgtaagagacgcatgaggaagcatggcgggatcacgacagaaaaccacgggccagtgagacgttggcataaacatatgtgtcgtcgtcgtgattaacacacgcctgccgctagcctggagcagttctgccagccaaaaaagcaagctggttttccccccagcaccaacaacagaaatcacagtgggacgtttctgcgcacctaaatcaatgactaatgcgcttgggtcaactatacttttcacgagtctttatgacctctctgggataaattatccccaacttaatccatcaggaagtaacgcaattatcaggcgttattagcccctataaataatggaaccactatgagtgccatcgactgtataattaccgctgccggattaagtagtagaatggggcaatggaaaatgatgttaccctgggaacagggaacaattcttgatacaagtatcaaaaatgcgttgcagttttgtagccgaattattttagtcaccggctatcgtggtaatgaactgcacgaacgttatgcgaaccagagcaatatcactattattcacaacccagattatgcgcagggtttactaacatccgtcaaggccgcagtacccgcagtgcaaacagaacattgttttctcacccacggtgacatgccaaccctcaccatcgatatttttagaaaaatctggagcttacgaaatgatggcgcaatactgccactccataatggcatccccggccatccgattttagtgagtaaaccatgcctgatgcaggcaatccaacgacccaatgtcaccaatatgcgtcaggcactccttatgggagatcattattccgtcgaaatagaaaatgcagaaataattttagatattgatactccggacgactttattacagcgaaggaaaggtatactgaaatttaaaaaacgtagttaaacgattgcgttcaaatatttaatccttccggcactcattatcataatgataaggaatcactgattttgagaaaagagaaaaattgataaatgggctggcaataataattttcaggagtgattttaattctcatttagcacctgtgagttcattcacaaaaagcccttaagtttcgagccgcctcacatttttttatatttcccgccaaacctggcaagagtggtgcgattgttgctctatccccctaaaccaccggatttctcaacaccggtcactcaatgatatctgtataagctaaggagagggttatgggggatattatgcgtcccattccgtttgaggaacttttgacgcgcatatttgatgaataccaacaacaacgcagtatctttggtattcccgagcaacagttttacagtcctgtaaaaggtaaaactgttagcgtcttcggtgaaacctgtgccactcccgtcggccctgccgctggcccgcacacgcagctcgcgcaaaatattgtcacttcctggctgactggcggacgcttcatcgaactaaaaaccgtccaaattcttgaccgcctggagctggaaaagccctgtatcgatgccgaagacgagtgctttaacaccgaatggtctaccgagtttaccctgcttaaagcctgggatgaatacctcaaagcctggtttgccctgcaccttctcgaagcgatgttccagccttctgattccggtaaaagcttcatctttaatatgagcgtcggttacaacctcgaaggtattaagcaaccgccgatgcaacagttcatcgacaatatgatggacgcatctgaccatccgaaattcgctcaatatcgcgatacgctgaataaattactccaggatgacgcatttttagctcgccacggattgcaggaaaaacgcgaaagcttgcaagccttacccgctcgcatccccaccagtatggtgcatggcgtcaccctctccaccatgcacggctgtcctccgcatgaaatcgaagccatttgccgctacatgctggaagaaaaagggctcaacacctttgtgaaacttaacccgaccttactggggtacgcgcgtgttcgtgagatcctcgatgtctgcggtttcggttacataggcttaaaagaagagagttttgatcacgacctcaagctgacgcaagcactggaaatgctggaacgcctgatggcactggcaaaagaaaaaagtctcggctttggcgtaaaactgactaacactctcggcaccatcaacaataaaggcgcactgcctggtgaagagatgtatatgagtggccgtgcgctgttcccgctctccatcaatgttgcagcagttctctctcgcgcctttgacggcaaactgcccatttcttattccggtggtgccagtcagctgactatccgcgatatttttgatacaggtattcgccctattactatggcaaccgacctgctgaaacctggcggctatctgcgcttaagtgcctgcatgcgcgagctggaaggctccgacgcctggggacttgaccatgttgacgtcgaacgactgaacagactggcagcagatgcgttaaccatggaatacacccagaaacactggaagccagaagagcgtattgaagtggcagaagacctgccgctgaccgactgctacgttgccccctgtgttactgcctgcgctatcaagcaagatattccggaatacatccgtctgcttggcgaacaccgctatgccgacgcgctggaactcatctaccaacgcaacgctctgcccgccattaccggtcatatttgcgatcaccagtgccaatacaactgtacccgcctggattacgacagtgcgctgaatatccgcgaactgaaaaaagtcgcgctggaaaaaggttgggatgaatataagcaacgctggcacaaaccagccggttctggtagtcgccatccggttgccgtgattggtgcaggtccggcgggtctggcagcaggttacttccttgccagagcgggccatccggttacgctgtttgaacgcgaagccaatgcgggcggcgtggtgaaaaatatcattcctcagttccgtattcctgcagagttaattcagcacgatatcgattttgttgccgctcacggcgtgaaatttgagtatggctgcagtcccgatttaaccattgagcagttaaaaaatcagggcttccactatgttctgattgccaccggcactgataaaaatagcggtgtgaaactggcgggcgacaaccaaaatgtctggaaaagtctccccttcctgcgtgaatacaacaagggtacagcgctcaagctgggcaaacatgtggtcgttgtcggggcgggtaacaccgcaatggactgcgctcgtgcggcgttacgcgttccaggcgtagaaaaagcaacgatcgtttaccgtcgtagtctacaagagatgcccgcatggcgcgaagagtatgaagaagcgttgcacgacggcgtagagttccgtttcctgaataatccggaacgtttcgatgctgatggcaccttaaccttgcgcgttatgagccttggcgaaccggatgagaaaggtcgtcgtcgtccggttgaaaccaatgaaacagtaacactgcttgtagacagcctgatcaccgccattggtgaacagcaggatactgaagccctgaatgcgatgggcgtgccgctggacaaaaacggctggccagacgtcgaccataatggcgaaactcgtctgactgacgtctttatgatcggcgacgtacagcgcggaccatcctccattgtcgctgctgtcggaaccgcgcgtcgggcgaccgatgccatccttagtcgggaaaatatccgttcccaccagaacgataaatactggaacaacgtcaatccagcggaaatctatcaacgtaaaggcgatatctctatcacgctggtgaacagtgacgatcgtgacgcgtttgtcgcccaggaagccgctcgctgcctcgaatgtaactacgtttgcagcaagtgtgtggatgtctgcccgaaccgcgccaacgtctccattgcggtcccaggcttccagaaccgtttccagacgctgcacctcgacgcttactgtaacgaatgcggcaactgcgctcagttctgtccgtggaacggtaaaccgtacaaagacaaaatcaccgtcttcagcctggcgcaagactttgataacagcagcaacccaggcttccttgtggaagattgccgggtacgagtacgtctgaataaccaaagctgggtgttaaacatcgacagcaaaggtcagtttaacaacgtaccaccggagctgaacgatatgtgccgcatcatcagccatgtccaccagcatcatcattatctgctgggccgcgtggaggtgtaatcatgttgattctgaagaatgtcactgcggtacagctacacccggcaaaagtgcaggaaggcgttgatatcgccatcgaaaacgatgtgattgtcgctatcggcgatgccctgacgcaacgctaccccgacgccagcttcaaagagatgcatggccggattgtgatgccagggattgtctgcagccacaaccatttttacagcgggctttcccgcggaattatggcaaacatcgcccctttgcccggatttcatcagtacgctgaaaaatctctggtggcggctcgatcgcgcccttgatgaagagagcctctattacagcggactgatttgttccctggaagcgattaagagcggatgtacaagcgttatcgatcaccatgcctctccggcgtatatcggcgggagactctccacattgcgcgacgcatttttaaaagttggcctgcgcgcgatgacctgttttgaaactactgaccgtaacaacggcatcaaagagttgcaggaaggtgtagaagaaaacatccgtttcgcccgtttgattgatgaggcgaagaaagcgacaagcgagccgtatctggtggaagcacatatcggtgctcacgcgccgtttaccgtgccggatgccggtctggagatgctgcgtgaagccgtgaaagccacaggccgtggtttgcatattcacgctgcggaagacctttacgacgtttcctacagtcaccactggtacggcaaagacctgctggcacgactggcgcaattcgatctcatcgacagcaaaacgctggtcgctcatgggctgtacttgagcaaagatgacatcaccctactcaatcagcgcgatgcgttcctggtgcataacgcccgtagtaacatgaacaaccatgtcggctacaaccatcaccttagcgacatccgcaatctggcgttgggaacggacggcattggtagcgacatgtttgaagagatgaaatttgccttctttaaacatcgcgatgcgggtggtccgctgtggcctgacagttttgccaaagccctgactaacggtaacgaactgatgagccgcaactttggcgcgaaatttgggcttctggaagccggttacaaagctgatttaaccatttgcgattacaacagcccgacgccgctgctggcagacaatatcgccgggcatatcgctttcggtatgggcagtggcagcgttcacagcgtgatggtcaatggtgtgatggtctatgaagaccgtcagtttaacttcgattgcgattccatttatgcacaagccagaaaagccgctgccagtatgtggcgtcggatggatgcgctggcataaatgacagatgccctcttcccgcagggaagagggttaaataaggaaagaagatgattgaacaatttttcaggcccgactctgtcgaacaggcgctggaactgaagcgccgctaccaggatgaagccgtctggttcgccgggggcagcaaactcaatgctacaccaacccgtaccgataaaaagattgccatttccttacaggatctggaactggactgggttgactgggataacggtgcactgcggattggcgcaatgtctcgcttgcagccactgcgtgatgcgcgatttattcctgcagcgctgcgtgaagccctcggttttgtttacagtcgccatgttcgtaatcagagcaccattggtggtgaaatcgccgcccgccaggaagagagcgtgctgcttcccgtcctgttggcactggatgctgaactggtttttggcaacggcgaaacgctgagtatcgaggactacctggcctgcccatgcgatcgcctgctaaccgaaattatcattaaagatccgtatcgcacctgtgcgacccgcaaaattagccgttctcaggcaggtttaaccgtcgtgacggcagccgttgcaatgacagaccacgacggtatgcgaattgcgctggatggcgtcgccagtaaagcactgcgtctgcatgatgtcgaaaaacaaaatctggaaggcaatgcacttgaacaggctgtcgccaacgccattttcccgcaggaagatttgcggggcagcgtggcctataaacgctatatcacgggagttctggtagccgacctgtatgccgactgccaacaggctggggaggaagccgtatgatcatccactttactttaaatggcgcgcctcaggagctaaccgttaatccaggcgaaaacgtgcaaaagctgttgtttaacatgggaatgcactctgtacgcaacagtgatgatggtttcgggtttgccggttctgacgcaataatctttaacggtaatatcgttaacgcgtccttgcttattgccgcacagttagagaaggcagatattcgtaccgcagaatctctgggcaaatggaacgagttaagtctggttcaacaggcaatggttgatgttggcgtggtgcagtctggttataacgatccagctgcagctctgattatcaccgatcttctcgatcgcatcgccgcacctacccgcgaagagatcgacgacgcgctttctggtttgttcagccgcgatgctggctggcagcaatactatcaggtcattgaactggcggttgcacgtaaaaataatccgcaggccaccattgatatcgctccgactttccgtgacgacctagaagtcattggtaagcattatcctaaaactgatgccgcgaaaatggtgcaggcgaaaccctgctatgttgaagaccgcgtaacggctgacgcctgcgtcattaaaatgttacgtagcccacacgctcacgcactgattactcatctggatgtcagcaaagctgaagccttaccgggcgtcgttcacgttattactcacctgaattgcccggatatctactataccccgggtggtcagagcgcaccggaaccgagtccgcttgaccgccgtatgttcggcaagaaaatgcgtcacgtcggcgatcgtgttgctgcggtcgtcgcagaaagtgaagaaattgcgctcgaagcactgaagctcatcgacgttgaatatgaagtgcttaagccggtaatgagcatcgacgaagcaatggcggaagatgcgcctgtcgtgcacgatgaaccggtggtgtatgttgctggtgcgccagatactctggaagacgataacagccatgcagcccagcgcggcgagcatatgatcatcaacttcccgatcggttctcgccctcgcaaaaatatcgccgccagtattcatggtcatattggcgatatggacaaaggctttgccgatgccgatgtgatcattgagcgaacctataacagtacgcaagcgcagcagtgcccgactgaaacacatatctgctttactcgtatggacggcgatcgtctggttatccacgcctccacccaggtaccatggcacttacgccgccaggtcgcgcgcctcgtgggcatgaaacagcataaagttcatgtcattaaagagcgagttggcggcggttttggttccaaacaggacatcctgctggaagaagtgtgcgcctgggcaacctgcgtgaccgggcgtccggtactgttccgctacacccgtgaagaagagtttattgctaacacctctcgtcacgtcgcgaaagtcaccgtcaaactgggagcgaaaaaagatggtcgcctgacggcagtgaagatggatttccgcgccaacactggcccttacggcaaccacagtctcaccgtaccgtgtaacggaccggcgctgagcctgccgttatatccgtgcgataacgtcgatttccaggtcaccacctactacagcaacatttgcccaaatggtgcttatcagggttatggcgcaccgaaaggtaacttcgctatcaccatggcattagcggaactggctgaacagttacagatcgaccaactggaaattatcgaacgtaaccgggtacacgaagggcaagagctgaaaattctcggtgcaatcggtgaaggtaaagcgccgacctccgttccttccgccgccagctgtgcactggaagagatcctgcgtcagggtcgcgagatgatccaatggagcagtccgaaaccgcaaaatggtgactggcacatcggtcgcggcgtcgccattatcatgcagaaaagcggtatcccggatatcgatcaggctaactgcatgatcaaactggaaagcgacggcacctttatcgttcattctggcggtgcggatattggtactggtctggatactgtagtgacgaaactggcagcagaagtgctgcactgcccaccgcaggacgtgcatgttatctccggtgataccgatcatgcgttgtttgataaaggcgcatatgccagctccggtacttgcttcagcggtaacgcggcgcgtttggcagcggaaaatctacgggagaaaattctgttccacggcgcgcaaatgttgggtgagccagtggcagatgttcaactggcaacgccgggcgtcgtgcgcggcaagaaaggcgaagttagtttcggggatattgcccataaaggcgaaaccggcaccggctttggtagtctggtgggaactggcagttatatcacgcctgatttcgccttcccgtatggcgcaaacttcgctgaagttgccgtcaacacgcgtacgggtgaaatccgcctggataaattctacgccttgctggactgcggtacaccggtcaatccagagttagcgttgggacaaatctacggtgccaccctgcgtgctatcggccacagtatgagcgaagagatcatttatgacgccgaaggtcacccgttaacgcgtgatttacgcagttacggcgcaccgaaaattggtgacattccgcgtgatttccgcgctgtgctggtgccgagcgacgataaagtcggcccgttcggggcgaaaagcatcagcgaaatcggtgtaaatggcgcagctccggcgattgctaccgcaattcacgatgcatgcggcatctggttacgcgaatggcatttcacaccggagaaaatactcactgcgctggaaaaaatataaataataaatggccgcttcggcggcctgtttctctgtttgaacgatgactaaatagtgactgcgaaaatgagataagccgttctcaaggcgtcctgcgccccaaattcgtgggaatttattttactaattcagatgatcaaatttactttaaaaggagtgaagggatgtctgatataaaccatgcaggttctgaccttatatttgaactggaggatcgccctccctttcatcaggctctcgttggtgccattacccatctgttggcaattttcgttccgatggtaacccccgcgttaatcgtgggtgcggccttacagctttccgctgaaacaactgcctatcttgtttctatggcgatgatcgcctctggtattggtacctggttacaagtaaaccgctacggcatcgtcggttctggcctactcagtattcagagtgtcaattttagttttgttacggtcatgattgcgctgggcagcagcatgaaaagcgacggttttcacgaagagttaatcatgagcagccttctcggcgtctccttcgttggcgcatttctggttgtcggatctagttttatcttgccctatttacgtcgggttattacgcctaccgtcagcggtattgtggtactgatgatcggcttaagcctgattaaagtcggcattatcgattttggtggaggatttgcagccaaaagcagcggtacgttcggcaattacgaacatctcggcgttggtttattggttttaattgtggtgatcggctttaactgctgtcgcagtccgttgctacgcatgggagggatcgccattgggctatgtgtcggctatatcgcaagcttatgcctgggcatggtggatttcagcagtatgcgcaatttgccgttaatcaccatcccgcatccgttcaaatacggctttagttttagcttccatcagttcctggtggttggcacgatttatctgcttagcgtgctggaagcagtcggcgatatcaccgccacggcaatggtttcccgccgccccattcagggggaagagtatcagtcccggctgaaaggcggcgtgctggcagatggtctggtttctgttatcgcctccgctgtcggtagtttaccattaaccacgtttgcgcaaaataatggggttattcagatgactggcgtcgctagtcgttatgtcgggcgaaccatcgcggtaatgctggttatcctcggcttatttccgatgattggcggcttcttcacgaccattcccagcgcagttctgggaggcgcaatgacgttgatgttttccatgattgccatcgcagggattcgcatcatcatcaccaacggtttaaagcgccgtgaaacacttattgtcgccacttctttaggtttagggcttggcgtctcctacgatcccgaaatttttaaaatattgccagcctctatttatgtattagttgaaaaccctatttgtgctggcgggttaactgcgattttattaaatattatcctccctggtggctaccgacaggaaaacgttctgcctggtattaccagtgcggaagagatggattaacagtaaaggagtcaatgatgagtggagaacacacgttaaaagcggtacgaggcagttttattgatgtcacccgtacgatcgataacccggaagagattgcctctgcgctgcggtttattgaggatggtttattactcattaaacagggaaaagtggaatggtttggcgaatgggaaaacggaaagcatcaaattcctgacaccattcgcgtgcgcgactatcgcggcaaactgatagtaccgggctttgtcgatacacatatccattatccgcaaagtgaaatggtgggggcctatggtgagcaattgctggagtggttgaataaacacaccttccctactgaacgtcgttatgaggatttagagtacgcccgcgaaatgagcgcgttcttcatcaagcagcttttacgtaacggaaccaccacggcgctggtgtttggcactgttcatccgcaatctgttgatgcgctgtttgaagccgccagtcatatcaatatgcgtatgattgccggtaaggtgatgatggaccgcaacgcaccggattatctgctcgacactgccgaaagcagctatcaccaaagcaaagaactgatcgaacgctggcacaaaaatggtcgtctgctatatgcgattacgccacgcttcgccccgaccagttctcctgaacagatggcgatggcgcaacgcctgaaagaagaatatccggatacgtgggtacatacccatctctgtgaaaacaaagatgaaattgcctgggtgaaaagcctttatcctgaccatgatggttatctggatgtttaccatcagtacggcctgaccggtaaaaactgtgtctttgctcactgcgtccatctcgaagaaaaagagtgggatcgtctcagcgaaaccaaatccagcattgctttctgtccgacctccaacctttacctcggcagcggcttattcaacttgaaaaaagcatggcagaagaaagttaaagtgggcatgggaacggatatcggtgccggaaccactttcaacatgctgcaaacgctgaacgaagcctacaaagtattgcaattacaaggctatcgcctcagcgcatatgaagcgttttacctggccacgctcggcggagcgaaatctctgggccttgacgatttgattggcaactttttacctggcaaagaggctgatttcgtggtgatggaacccaccgccactccgctacagcagctgcgctatgacaactctgtttctttagtcgacaaattgttcgtgatgatgacgttgggcgatgaccgtagcatctaccgcacctacgttgatggtcgtctggtgtacgaacgcaactaataataaaactttaacatcctcgtgaggacatcattatgtctggagacatcctacaaacaccggacgcaccaaagccacagggcgcgctggataattattttaaaattaccgctcgtggcagtaccgttcgtcaggaagtactggctggcttaacgacctttctggccatggtttattccgttatcgtcgttccgggaatgctgggcaaagcaggttttcctcccgcagctgtgtttgttgccacctgtctggtcgcgggcttcggcagcttgctgatgggattatgggctaatttgccaatggcgattggttgcgcgatttccttgacggcgtttaccgcattcagtctggtactcgggcaacaaattagcgttcctgtcgcactgggcgcggtatttctgatgggcgtcatcttcaccgccatttccgtaaccggtgtgcgtacctggatcttacgtaatttgccgatgggtatcgctcacggtacaggtatcggtatcgggctgtttctgctgctgattgctgctaacggtgtgggtatggttatcaaaaacccgattgaaggcttgccagtggcgctcggtgcgtttacctccttcccggtgatgatgagcttgctggggctggcggtcatcttcggcctggagaagtgtcgcgtacccggcgggatcttgttggtgattattgcaattagcatcatcggcttaatctttgacccagcggtgaaataccacggtctggtggcgatgccaagcctgactggcgaagatggtaagtctctgattttcagcctcgatattatgggtgcactccagccaactgtacttccgagtgtactggcattggtgatgaccgcagtgttcgacgctactggcaccatccgtgccgtcgccggtcaggcgaatttgttggataaagacaaccagatcatcaacggcggcaaagccctgaccagtgacagtgtaagtagtatattctccggcctggtgggcgcagcgcccgcagcggtttatatcgaaagtgcggcaggaaccgccgccgggggtaaaacaggtttaaccgcaaccgtagtgggggcgttattcctgttaattctgtttttaagtccgctgagttttttgatccctggttacgccactgcacccgctctgatgtacgtaggtttgctgatgttaagtaacgtcagcaagctggatttcaatgattttattgacgctatggctggcctggtgtgtgccgtgttcatcgttctgacttgtaatatcgttaccggtattatgctgggctttgtgacactggtcgtaggccgcgtctttgcacgcgaatggcaaaagctgaatattggtacggtgatcattactgccgcactggtcgcattttacgcgggtggttgggcaatctaatagattctccgcgcctttcagcgcggagatttctttcagagaggattctcaccgctggcaacaatacgctgctggcggactcgcctgagttctctttcagtaagcaactgcagcgcctgtgttgggcaagattcaacgcaggctggcccctcttcccgctgttcacagagatcgcatttcacaatttgttgtcgggtatcccccggcaagctctgaatggtgatcattccaaacgggcacgcactgacgcaactctgacagccaatacaacgggcagaattggtctgcaccacctgctcgcccatcgtcagcgcccccacggggcaagcgccaacacaaggggcgttttcacactgatggcacatcaccggcgcactgatgctgtccagtcgctgtaccttcagccggggtaaaaagacatcggcattcaactcctgttcactagggtgagcgaccacacaggctacttcacaagtacggcagccaatacagtcagccggattaacgataattaagcttttcatcagcttgccttcgtatcaaacagagttaacatatcgcgcgccgcctgccttcctgcggccattgcagtgacaaccagatccgcgccatgaactgcatcaccaccagcaaagacttttttcagatgcgtctgggtaggtaaatacccgacgtcaccggtttgaatcaggccccatttatcgagtttaattccgctgccctgcaaccacggcatggcatgcgcctggaaaccaaaggccataatcagaacatcggcgggcaattcaaactcactacccgctaccggacgaggacgacggcgaccatccggccccggctcacccatggcggtacgaatcaggcccaccgcagttaaacgcccatcttcgtcacaagcgatatattgcggttgaacattgaactgaaactcgacaccttcctcgcgcgcattaaccacctctttgcggctgcccggcatactgacttcatcacgacgatacgcgcaggtcacgctggcggcattgaggcggatggaagtccgcaaacaatccattgtcgtatcgccaccgcccaataccacgactcgcttaccttccacgtccgtcagcggatactcttcagactccggcaatcccatgagctggcgggtatgggcagtcaggaacggtagagcctgaatgacaccgggcgcatcttcatgcggcagatctgctcgcatcatcccgtaagtccccacgccgatgaaaactgcatcatattcagaagttaaatcgctaaaggtaatatcgcggccaatttcacagttaagatgaaagtcgattcccattgcggtgaatatctctcgccgctggcttaataccgttttatcgagtttgaaaggaggaatgccaaaagtcagcataccgccaatttctggatggcgatcaaagacatcgacctgaactcctgcgcgcgccagaatatcagcacaccctaaccctgcaggcccagcgccaatcaccgccactttttcgctacggggaacaactttgctgacatcgggacgccaacccatcgccagcgcggtatcggtgatgtagcgttccagattaccgatagagactgcgccgctgtgatctttcaaagtacatgcgccttcacaaagacggtcctgtggacataccctgccgcaaatttctggtaaggaactggtctggtggcaaagttctgccgcttcaataatctttccttcctgtaccagacggatgtaatccggaatagcgttatgcagcgggcaatgccagttgcagttagctttttcggcacaataaacacagcggtcactctcataagtcgcttgttgtggatccagcccgcaatatatttcgccaaagtgggttttccgttcactcgcactaattttatctgcgcctttacggctgttaacggggagcaacgctgcactgcgagatggctgagcgtcactactcgcttttcctgctgccgttttgcgctggcgggccacctttatctgctgcaaccctttatcgtccatcagtcgtaacgcctgtgttgggcaaacttcaatacaggcttgcgtgccggaactgcgctggttacaaaggtcgcatttctgcgcaatcgtatcgaccatctcaacgacgccaaaggggcaagcgattgcgcatcttttacaaccaatacatttttgctcgtccagttgtacgctatcggactggaaagtcagagcattaaccggacaagccgtaacgcaaggggcattgttgcagtgatggcaggccaccggattcgcagcctggcctttccctacaacgtggatacgcggtcgaaagtcactgtgactcagcggccagttttcttgattgtgtgccaccgcacaggcaatttcacaagcatgacagcctatacattccgcagcttcagcagcaataaacttattcatttgcatccctttcatttaatgagttatgtcttctcaaatttcgcgatgcaataaacgggcatatattaggtagcatgaccgttttaattataattttgcgactgagttcaaattattgcccctcaatctatgccgctttcattatttcaacattgccgatcaaaagagcgctatccagataaaaacgattaaatgcgagagtgcgacatgccagaatgattaatgaaatatcaatatgagaaaattacagataattccattgtcaggttctcttctcattttcgtggtttaaccacgattatgtgattgcctccgcaattcctgtctctaactccccttcctcgcaaaaactggcactccacgagcatgtgtttagacagtttcattaacgtaaacggttgctttttactctggcgggcgaaaggagaaacactgatgagcgccatagattcccaacttcccagttcttctgggcaagaccgcccaactgatgaggttgaccgcatattaagtccaggaaagctgatcatactcggtctgcaacacgtccttgtcatgtacgcaggtgcagtcgctgttcctcttatgattggtgaccgactgggcctcagtaaagaagctattgcgatgctcattagcagcgatctcttttgctgcgggatcgtcacattattgcaatgtatcggtatcggccgctttatggggatccgcctgccggtgattatgagcgtgacctttgctgctgtaacaccaatgatagccattgggatgaacccggatatcggcctgctggggatatttggtgccactatcgccgcgggttttatcaccacattattagcgccacttatcggtcgcttgatgcctttattcccgccactggttaccggtgtggttattacttctatcgggcttagcatcattcaggtgggtattgactgggccgccggaggtaaagggaatccgcaatatggtaatcccgtttatttaggtatctcctttgccgtcttaatttttatcttgctcattactcgctatgcgaaaggatttatgtccaacgtcgccgtattactggggattgtatttggctttttacttagctggatgatgaatgaagtcaatttatccgggctacatgatgctagttggtttgcgattgttacgccgatgagctttggtatgccgattttcgatcccgtttccattctgaccatgactgccgtgttaatcatcgtgtttatcgagagtatggggatgttcctggcactgggtgaaatagtcggtcgtaaactctctagccacgatattattcgcgggctgcgtgtcgatggcgtagggacaatgataggcggcacgtttaacagcttcccccacacgagtttttctcaaaacgttggcctggttagcgtgacgcgcgttcatagccgctgggtgtgtatttctagcggaattatattaatcctgtttggcatggtgccaaaaatggcggtgctggtagcctccattccgcaatttgtgctgggcggcgctggtctagtgatgttcggcatggtactggcgacagggattcgaattctgagccgctgtaactacaccaccaaccgttacaacctctatattgtggcgatcagtctcggcgttggcatgactccgacgctctctcacgatttcttttctaagttaccggccgtactgcaaccgctgctacatagcggcattatgctcgcaacccttagcgccgttgtgctgaacgtcttctttaatggctatcagcatcatgctgacctggtgaaggaatccgtctctgataaagatttaaaagtcaggacagtacgtatgtggcttctgatgcgcaagctgaagaaaaatgagcatggagaataatatgaattttttaatgcgcgctatattcagtctgttgttgctttttactctctctattcctgtcatttctgactgtgttgcaatggccattgaaagtcgcttcaaatatatgatgctacttttttaaatggtttttacctgtcggcatccgctcaaaacgggcggttgtcgataaacgctcacttggttaatcatttcactcttcaattatctataatgatgagtgatcagaattacatgtgagaaattatgcaaacggaacacgtcattttattgaatgcacagggagttcccacgggtacgctggaaaagtatgccgcacacacggcagacacccgcttacatctcgcgttctccagttggctgtttaatgccaaaggacaattattagttacccgccgcgcactgagcaaaaaagcatggcctggcgtgtggactaacagcgtttgtgggcacccacaactgggagaaagcaacgaagacgcagtgatccgccgttgccgttatgagcttggcgtggaaattacgcctcctgaatctatctatcctgactttcgctaccgcgccaccgatccgagtggcattgtggaaaatgaagtgtgtccggtatttgccgcacgcaccactagtgcgttacagatcaatgatgatgaagtgatggattatcaatggtgtgatttagcagatgtattacacggtattgatgccacgccgtgggcgttcagtccgtggatggtgatgcaggcgacaaatcgcgaagccagaaaacgattatctgcatttacccagcttaaataaaaaaaccccgacatttgccggggttgtgagcataacgtaatgcttattttaccggacgcatcgccgggaacagaataacgtcgcggatggtatggctgttggtgaacagcattaccatacggtcgataccaattcccagacctgctgtcggcggtaagccatgttccagtgcggtgacgtaatcttcatcgtagaacatcgcttcgtcgtcacctgcgtctttcgcggcaacctgatccaggaagcgttgcgcctgatcttccgcgtcattcagctcgctaaagccgttaccgatttcacgaccaccaatgaagaactcaaagcggtctgtgatttccgggttaacgtcgttacgacgcgccagcggagaaacttctgccggatattcagtaatgaaggtcggctgaatcagatgtgcttctgccacttcttcgaagatctcggtaacgatacggcccagaccccagctcttctcaacgtggatgccgatagattcagcaattgctttcgcagagtcgaagttgtccagatccgccatgtcggtttccgggcgatatttcttgatcgcttcacgcatggtcagtttttcgaacggtttaccgaagtccagcgtcacgtcgccgtaggtcacttccgtcttaccgagaatatcctgtgccagagtacggaacaggctttcggtcagctcgatcagatctttgtaatctgcgtaagccatgtagagttccatcatggtgaactctgggttatgacgtacggaaataccttcgttacggaagttacggttgatttcgaatacacgctcgaagccaccaaccaccagacgcttgaggtacagttccggcgcgatacgcaggtacatgtcgagatccagcgcgttatggtgggtgataaacggacgcgcagcggcaccgccagggatcacctgcatcatcggcgtttcaacttccataaagccgcggttcaccatgaactggcgaataccagagaggatctggctgcgcactttaaaggtgttgcgggattcatcgttggagatgagatcgagataacgctgacgatagcgcgcttcctgatcctgcaagccgtggaatttatccggcagcggacgcagtgctttggtcagcagacgcaactcggtgcagtggatagacagttcgccggttttggttttgaacagcttacctttcgcgccgaggatgtcgccgaggtcccattttttgaactgctcgttataaacgccttccgggagatcgtcacgggcaacgtacagctgaatgcgaccgccaacgtcctgcagggtaacgaaagacgctttacccataatacgacgggtcatcatgcggccagcaacggcgacttcgatgttcagcgcttccagttcttcgttctctttgccgtcgaattctgcgtgcaattggtcagaggtatgatcgcgacggaaatcgttcgggaaggcaatcccctgctcgcgcaggttcgccagcttctcacgacgcgttttcagttcattgttaagatcgactaccgcgtcagcgccctgtgcgtgttgttcagacatgttggttcctcataaccctgctttcaaacttgcttcgataaattgatccaggctgccgtccagcacggcctgcgtgttgcgggtttctaccccggtgcgcagatctttaatgcgggagtcatcaaggacataagaacgaatctggctgccccagccgatgtcggatttgttatcttccatcgcctgtttctcggcatttttcttctgcatctccagttcataaagcttcgctttcatctgcttcatggcctgatctttgttcttgtgctgggaacggtcgttctggcactgggtcacgatcccggtcgggatgtgggtaatacgcaccgcagattcggtacggttaacgtgctgaccgcccgcgccggacgtgcgataaacgtcaatgcgcagatccgccgggttgatttcgatatcaatatcatcatcaacttccggataaacaaacgcggagctgaagctcgtgtggcgacgaccgccggagtcaaacgggcttttacgcaccaggcggtgaacgccggtttctgtacgcagccagccgtaagcgtaatcgccggagattttgatcgtcacggatttaatacccgccacttcaccttcgctctcttcgatgatttcagttttgaaaccacggctttctgcccagcgcagatacatacgctcaagcatgctcgcccagtcctgtgcttccgtaccgccagaccccgcctgaatatcgaggtagcagtcggcgctgtcatattcgccagagaacatacggcggaactcaagctgcgccagtttttcttccagggcgtcgagttcagcaacggcttcgttaaaggtttcttcgtcgtcagcttctacagccagttccagcagaccagaaacatcttccagcccctgtttcatttggtcgagggtgtcgacaacggcttcgagggaggaacgctctttacccagcgcctgtgcgcgttcgggttcgttccagacatccggctgttccagctcggcgtttacttcttccagacgctctttcttggcgtcgtagtcaaagataccccctaagaacgtcggagcgttccgtgaggtcctgaatgcgattatttaccggattaatttcaaacatggtctgatttcttttattgagctagtcaaaatgcggtgataagagcgggattgtacccaatccacgctcttttttatagagaagatgacgttaaattggccagatattgtcgatgataatttgcaggctgcggttgccgcgaaactcgttgatatcgagcttataagccagttgcacttcgcgcacgccgttatccggccagagggcggtatcgacattaaaagcaataccatccagcagtggaccgccgccgaccggttcgaccatcaccttcaaatgacgttcgcccaccagccgctgttgcagcagacggaaatgaccgtcaaacagcggctccgggaacatctgcccccacgggccagcatcgcgcagcagctgcgccacttccatggtcatttcggccgggcttaacggaccgtcacttaccacttcgccttgcaataggctagggtccagccactcagtaaccagttcgccaaaccgttgttgaaagagtttgaatttatcctcttccaggctcaaacccgccgccatcgcatgaccgccaaacttcagcatcatgccagggtagagtgtgtctaatcgctccagcgcatcacgcatatgcagcccctgaatggagcgaccggaacctttcagcgtaccgtcacctgctggcgcaaacgcgataaccggacggtgaaaacgctctttgatgcggctagccagaataccgacaacgccctgatgccattcggggtgatacattgccagcccgccgggtagcgtgtcacggctgcgctccagtttctcgcacagggtcagggcttcaatttgcattccttgttcgatctcttttcgcgtctggtttagcgcatcgagttcatttgccagcacgcgcgcttcgccgatgttgtcgcacaacaacagcgccacaccgacggacatatcgtccagtcgtccggcagcattgagacgtggccccagcgcaaaacctaaatcgctggcggcgagtttttgtgcatcacggtttgccacttcaagcagcgctttaatccccggacggcactttccggctcggatgcgactcatcccctgccaggtcagaatgcgattattagcgtccagcggcacgacgtccgccactgtccccagcgcgaccagatccagcagttctgccaggttaggaattgcgatgttacgctcatcaaaccagccctgatcgcgcaaaaaggtgcgcagcgccagcatcagataaaacgccacacccacgcctgccagacttttgctcgggaaattacagtcgcgcaagttagggttaatgatcgcttccgctgcgggtaatgtgtcgcctggcaaatggtgatcggtaacaataaccgggatgcccaagctgcgagcgtgctcaacccccgcatgggaggaaataccgttatccaccgtgacaattaactgcgcgccacgggcatgggcctgatcgaccacttccgggcttaagccgtaaccgtcttcgaaacggtttggtaccaggtagtcgatattgctgcaaccaaggctgcgcatcgccagcacgcttagagccgtgctggtcgcgccgtcggcgtcgaaatcaccgaccacaataatccgcgttccttcgcgaaaagcgttgtaaaggatctcaacggccttttcgacgccgctcagttgctgccagggcagcatacctttaacactgcgttccagttcttgcgcactgcgtactccccggctggcgtataaacggcgcagcaagggaggcaattcagcgggcaagtctgccgtttcatcgacttcacggcgacgaagttgtatctgttgtttcacgcgaattatttaccgctggtcattttttggtgttcgtcgaggaattctttcatctctttcggcggctggtaacccggaacaagtgtgccattgctcagcacaactgccggagtaccgctaacgccaagctggacgccaagtgcgtaatggtcggcaatatccacgtcgcaactggctggtgcgacgcttttacctgccatcacatcatcaaacgctttgtttttatctttcgcacaccagatagctttcatttctttctctgcatcgctgtccagcccctggcgcgggaaagcaagataacgcacggtgatccccagcgcgttgtagtctgccatttgctcatgcagtttgtggcagtaaccacaggtaatatcagtaaacacggtgatgacgtgtttttcctgcggcgctttataaacgatcatctctttttcaagcgcattcaactgctttaacagcatcttattggtgacattgaccggagccgtgccactaacgtcatacattggcccctgaatgatatgtttaccatcatcggtgatgtacaacacgccgctgttagtcagaactgtcttcatgccagctacaggcgcgggctgaatatcgctgcttttgatgcccattttggctaacgtttgttgaattgccgcgtcatcagcctgagcaaagccactaaacgccgctaacaaagtaaacaacataaaacctttcttcataaatcttcccgttcttttcagacatcacgcccgcgggtgatgctgttgatgaagttgccgcagacgctcggtagcgacatgcgtataaatttgcgtggtggagagatcgctgtggcccagtagcatctgcaccacgcgtaaatccgcaccatgatttaataaatgagtggcaaaagcgtgacgcaacacatgcggactcagcttttcgctgtcgatacccgccagcacagcataatgtttaatacggtgccagaaggtctgtcgcgtcatctgctgcgcacgctggctgggaaacaacacgtcaatactcacaccattcagcagccacggacgcccatgttccagataggtttccagccagtaaaccgcctcttcacctaacggcaccagacgctctttgttgcctttaccaatgacccgtaccacgccctgacgcaggctgatatcactcattgtcagtccgaccagttcagagacacgcagcccggtagcatacaacacttcaagcatggctttatcgcgtagctccagtggctgatcgattaatggtgcctgtaataaacgttcgacctgcgcttcgcttaaatcttttggcaaacgctggggcaatttcggactagcgagatgcgcactgggatcgtcttcacgaaacttttcgcgataaagatactggaacaatcggcgcactgcactcagcaaacgcgcactgctggtggctttatacccgccctccagccgttctgccagtaatgcctgcaaatcgtcactttgcgccgtcgccagcgtcaacccgcggtgatgcaaccactccaccatcatactcagatcgcgacggtaagcgttcaacgtattttcagccagatttttttccagccacagagcatcaagaaactgctcgatgcgtgccagatcctgtttcacttgcgccccttatggtcactcatttgatccattatgccttattgtgccgtgactaaagcgattctgatacactagccgcaaaagccacagcagaatcgagaagcttacgttatgaatatgggtcttttttacggttccagcacctgttacaccgaaatggcggcagaaaaaatccgcgatattatcggcccagaactggtgaccttacataacctcaaggacgactccccgaaattaatggagcagtacgatgtgctcattctgggtatcccgacctgggattttggtgaaatccaggaagactgggaagccgtctgggatcagctcgacgacctgaaccttgaaggtaaaattgttgcgctgtatgggcttggcgatcaactgggatacggcgagtggttcctcgatgcgctcggtatgctgcatgacaaactcagcaccaaaggcgtgaagttcgtcggctactggccaacggaaggatatgaatttaccagcccgaaaccggtgattgctgacgggcaactgttcgtgggtctggcgctggatgaaactaaccagtatgaccttagcgacgagcgtattcagagctggtgcgagcaaatcctcaacgaaatggcagagcattacgcctgatctcactgacggcttagcgcatatgctttgccgtcatctttatctttgcgtctcttgttgcaacaaaatccgccgtaaatcccgccattcagcttcgtccatgctgtcggctgccagccataaatgttgccgtttaccgccatcagaacgtaaacgcagcatcatgccgctcttaatcatccacggtgctttgacgatgctccactcctgcccttgccaacgcaaacgcccgtccatcaacaagcgaatttccccctggcgagcattaatacgccgctggctgcgaacgcaatcaaacaccaccaggctaagtaacaccatccataacggggtgtaactgagtggccagggcatgagtaaaataacagcggcaaccagcccatgaatcagcaaggaaagccactgtgcgcgccaggagacgcgcaaatcagattgccacaggaccacgttcccggttccgtgtctggatgagtcggaccatcatttccagttctgcatcggccggtttaccgtgattcatcagccagttaaacaggtccggatcgtcacattccagcagacgaataaagatgcgtttttcgtcatcgcttaagctgtcgtactcatgttcgaaaaacggcatgatactaatatcgagttcgcgcataccacggcggcatgcccaatgaatgcgggctttgttgttaatgtccatcttcttcctgtctcacgaaaatccagtacccggctattgtaacgtgtttttcgccttcttttacgggaatatcagtaaacaccatcgcgatcgcgaaattaattcacaacaattcaatggcttcatttttttggaagtcgcctcgcagaaggcacagatcgcgtagtgaaagcacttgcattgcctcatagctcttttaccattagtcattaatacgccgttaagcaactcaggactctattatggcttttacaccttttcctccccgtcagcctacggcttctgcccgtttaccgctgacgctgatgacgcttgatgactgggcgcttgccaccattactggcgcggacagcgaaaaatatatgcagggtcaggtgacagcagatgtcagccagatggcagaagatcagcacctgctcgccgcccattgcgacgccaaaggtaaaatgtggagcaatttacgtctgttccgcgacggcgatggctttgcatggattgaacggcgcagcgtgcgtgaaccgcagctgactgaactgaaaaaatatgcggtattctctaaagtgaccatcgcgccagacgacgagcgtgtgctgcttggtgttgccggttttcaggcgcgcgccgcgctggcaaatctctttagcgaactgcctagcaaagaaaaacaggtagtcaaagaaggcgcgaccactttgctatggtttgaacacccggcagaacgtttcctgatcgtaaccgatgaagctactgctaatatgctgaccgataaactgcgcggtgaagcggaactgaacaatagccaacagtggctggcattaaacattgaagcgggtttcccggtgattgatgccgccaacagcgggcagtttatcccacaggcgaccaatctccaggcgctgggcggtatcagctttaagaaaggctgttataccggacaagagatggtggcgcgagcaaaattccgtggtgccaataaacgtgcgctctggttgctggcaggtagcgccagccgactgccggaagctggtgaagacttagagctgaaaatgggcgagaactggcgtcgtaccggtacggtactggctgcggtaaaactggaagatggtcaggtcgtggtacaggtcgtcatgaataacgatatggaaccggatagcatcttccgcgtacgcgacgatgcgaatacattgcatatcgagccgctgccgtatagcctcgaagagtaaatctctttatcgcatcaggcatttatcgcctgatgcgacgctggcgcgtcttatcatgtctgggatttgatgcctttatcacaacagggacgaggcccgtagatcggataaggcgttcacgccgaatccggcagttgtgctccgatgcctgatgcgacgctggcgcgtcttatcaggcctacaaaggcatacccattacgcctgcccaatatacaaatagatcgccagaaagtggcacacactaccgccgagcacgaagccgtgccagatggcatggttgtatggaatgcgtttgcagacgtagaaaatcaccccgaggctataaaccacgccgcctaccgccagtaaggtaacgctgcccgccgcgagcttaactgccatttcataaattaccaccaggctcagccagcccatcgccagataggtcaccagagataaaattttgaatcggtgcgcgatggtcagtttaaacagaatacccagcaatgccaggctccagataacaatcatcaacccgcgcgctaacggagaatccagccccaccagcaaaaacggcgtgtaggttccggcaatcaacaggtaaatagcgcaatggtcaaatttcttcagccacatttttgcccgttgatgaggaatggcgtgatagagcgtgctagcgaggaacagcaggatcatactgccgccatagaggctgtagctggttatcgctgtggcgctggcattaagatccaccgcctgaaccagtagcaacaccagcccaacgataccaaacaccaacccaatgccgtgactgacgctgttggctatttcctctgccagactatatccctgcttaatgaggggcttctgaaccataacttactccggagaaacgtacacgcacatgtatacctctccagcgtaactgagaatagttccagtgaacacctgttagctaaaataaattctgatttgagactaatctcctaaaaatcatgaaattaaatgcgaaatttcaactaacaggcgtgagttcaatttaaagacatttaaattcaatcacataaaattgtgtctgaccgggatagatgtcagcaatgacttttttcagttcagtcagggtcatattttcctgctctgcatgtttttcagtcagcgtatccagcgttacggtactggttgcggtgacttcaatcgtgcaaaaataaccgtcatcttcaaaacgtccgacacgaagcacatcacccgttttgaagtggctttcagactcgtcgcggatggtgatggttttacgcccagccagaatgtcatcctggaaacgttgaaaaaaagtgatgtcgtttggctgcatggtactatttcctgtaagaattgactcatctggagcctatgatagtgaaaaaactcaccttaccgaaagatttcttatggggcggcgcagttgccgctcatcaggtcgaaggcggctggaacaaaggcggaaaagggccgagcatttgtgacgttctgaccggtggcgcacacggcgtgccgcgcgaaatcaccaaagaagtcttgccaggaaaatactatccaaaccatgaagccgttgatttttatggtcactataaggaagacatcaagctatttgccgaaatgggcttcaaatgttttcgtacatccattgcctggacgcgcatttttccaaaaggcgatgaagctcagccaaacgaagaagggctgaagttctacgatgatatgttcgatgaactgctgaaatacaacatcgaaccggtgatcaccctctcccactttgaaatgccgctgcatctggtgcagcaatacggtagctggaccaaccgtaaagtggttgatttctttgtacgtttcgcggaagtggtatttgaacgctataagcacaaagtcaaatactggatgaccttcaacgaaattaacaaccagcgtaactggcgtgcaccgctgttcggttactgctgctccggcgtggtgtataccgagcatgaaaacccggaagagacgatgtatcaggtgctgcatcaccagtttgtcgccagcgccctggcggtgaaagctgcgcgtcgcattaacccggagatgaaagtcggctgtatgctggcgatggtgccgctctatccttactcctgtaacccggacgatgtgatgttcgctcaggagagcatgcgcgaacgctacgtctttaccgatgtgcagctacgcggctattacccgtcctatgtgttgaacgagtgggagcgtcgcggatttaacatcaaaatggaagacggcgatctggatgtgctgcgtgaaggcacctgcgattatcttggtttcagctattacatgaccaatgcagtgaaggccgaaggcggcaccggcgatgcgatctctggttttgaaggcagcgtaccaaacccgtatgttaaagcatctgactggggctggcagattgatccagtaggtctgcgctatgcactttgcgaactgtatgagcgttatcagaggccgctgtttattgtcgaaaacggttttggcgcttacgacaaagtggaagaagatggcagcatcaacgacgactaccgcattgactacctgcgcgcccatatcgaagagatgaaaaaagcggtgacttacgatggcgtggatctgatgggctacacaccgtggggctgcatcgactgcgtgagcttcaccaccgggcagtacagcaaacgctacggctttatctatgtgaataaacatgacgacggtactggcgatatgagccgtagtcgtaagaagagctttaactggtacaaagaggtgattgccagcaacggcgagaagctttaagtcgatgaagtaccggatgcaatacttgttgcatccggtcagacaacttccctgttttatttcccgcccgccaaatcgataaaacttcccgtgacgtaagaggctttatcacttagtagccagacaatggcctgcgcgacctcttctgcctgtccaccacgctgcatggggatgttgctcttaacgcgatcgacgcgtccaggctcgccgccgctggcgtgcatttcggtataaataaaccctggccgcacgcagttaacgcggatcccctgcgcggcgacttccaggcttagtccggtggttaacgtatcaatcgcccctttgcttgccgcgtaatcaacatattcccctgggctacccaaccgactggccacgctagagacattgacgatagcgccgccactgccaccatttttaagcgccatgcgttttaccgcctcgcggcagcagagaaaatatcccgtcacgttggtggaaagtactcggttgattcgctctgcggtaaggttttcaacggtgcactgggtaaacaagatcccggcgttattgaccagcgctgctagcggttcatcgtgctgatcgattgctgtaaacatcgcaacgacctggttttcgtcgctgatatccgcctggagcacgaatgctttgccaccggcttgcgttattaagttcatcacttcctgcgccgcgtggaggttttgctgataattaaccgccaccgtatacccttcttgcgccaacagtaatgcagttgcccgcccgatgccgcgactgccaccagtcacaagtgctatagccatttgtttttccgagaaaaattaattcgttgacgtatctttgagattgctaacaaactggctcaatcttcaatgttggcacgcttttccccctcgccctttcagggagagggccggggtgagggtaaatattcgcgccagtgccggcctgttcccctcaccctaaccctctccccaaaggggcgaggggactgtctgagcacttttgtactttgtcatctgactaaaaaggcgccgaagcgcctttagaaaatagtcgaatcagtgaattactggtattcgctaatcggtacgcaggagcagaacaggttacggtcgccgtaaacatcatccagacgtttcactgtcggccagtatttgtctgccacacctgccgggaataccgcaacttcacggctgtacggatgcgcccactcggcgaccagttcgctctgaatgtgcggcgcgttcaccagcgggttatcttccagcggccagacaccggctttcacctggtcaatttctgcgcggatagccagcatcgcgtcgataaagcgatccagttccactttgctttcagattcagtcggttcaaccatcagcgtacccgccaccgggaagctcatcgtcggcgcgtggaaaccgtagtcgatcaggcgcttggcaatatccagctcgctgatgccggtttcttctttcagcgggcgaatatcgagaatacattcgtgcgccacgcgaccgtcgcgaccggtatacagcaccgggaaggcatcctgcaggcggctggcaatatagttggcgttgaggattgccacctggcttgcttttttcagcccttctgcgcccatcatgcggatgtacatccagctgattggcaggatagaggcgctaccgaacggtgccgcagaaaccgcgccctgacgggttaacatgccttcgatttgcaccacgctatgacccggtacaaacggtgccaaatgcgctttcacgccgatcggtcccatacccggaccaccaccgccgtgcggaatgcagaaagttttatgtaggttaaggtgactaacgtccgcaccaataaagcccgggctggtgatgccaacctgggcgttcatgttcgcgccatcaaggtaaacctgaccgccgaactgatgcacgacttcacacacttcacggatcgtttcttcatacacgccgtgggtagaaggataagtcaccatgatacaggagaggttatcgcccgcctgttccgctttcgcgcgcagatcagtcagatcgatgttgccgtttttatcacacgccacaaccaccacctgcattcctgccatatgtgcagaagcggggttagttccgtgcgcagaagccgggatcaggcagatatcgcgatgcccttcgttgcggctttcatgataatgacgaatcgccagcaggcccgcgtattcgccctgtgcgccagagttcggctgcatacaaacggcgtcgtaaccggtcagtttcaccagccagtcagccagctgcgcaatcatctgctgataaccttcggcctgctccggcgggcagaacgggtgcagttcggcaaattccggccaggtgattgggatcatctcggcggcggcgttcagtttcatggtgcaggaacccagcgggatcatcgcctgattcagcgccagatctttacgctccaggctgtgcatatagcgcatcatttcggtttcgctgtggtagcgattaaacaccggatgggtgaggatttcgtcgtcgcgcagcatcgcaggctggatagagcggctgtcgtgagccacgtctttgtccagcgtgtcgatgtccaggccgtggttatcgcccagcagcacgttgaaaagctgcattacgttttcacgcgtggttgtttcatcaagggtgatcccaaccgcgttcagaatatcgctacgcaggttgatttcagccgcttcggcacgcgtcagtacgcccgctttgtcggccacttccacacacaaggtgtcgaaatagtgcgcatggcgcagtttcagacctttttgttgcaggcccgccgccaggatatcggtcagacggtgaatgcggttagcgatacgtttcaggccaaccgggccgtgataaacggcatacaggctggcgatgtttgccagcagtacctgggaagtacaaatgttggagttcgctttctcacggcggatatgttgctcgcgagtctgcatcgccatgcgcagcgcggtattgccagctgcatctttgcttacaccgataatacggcccggcatactgcgtttgtattcatctttcgccgcaaagaatgccgcgtgtgggccaccgtagcccatcggcacgccgaagcgttgcgcgctaccaaaaacaatatccgcgccctgtttacccggcgcagttaacagcaccagcgccataatatcggcggcaacgctgaccacaattttgcgacttttcagttcgctaataagcgcagtgtagtcgtgaatttcaccggtagtgcctacctgctgtaacagcacgccgaagacgtcctgatggtcgagcactttttgcgcgtcatcgacaatcacttcaaaaccaaaggtttcggcacgagtacggaccacatccagcgtttgcggatgcacatcggaagccacgaagaagcggttggcatttttcagtttgctgacgcgtttcgccatcgccattgcttcggcggcagcggtggcctcgtccagaagagaagcagaggccatatccagtccagtcaaatccagcgttacctgctggaagttgagcagtgcttcaaggcggccctgggagacttcaggttgatacggagtgtacgcggtataccagcccggattttccagcatgttacgcaggataaccggcggtagctgcacggcggtgtaacccatgccgatgtaagacgtgaagcgtttattgcgactggcaatagccttgagttctgccagtgcggcgtattcggtcgccggtgcgccaacctgcggtggtgtcgcaagttgaatatctttcggcacaatctggccggtcagcgcgtttaagctttgtgcaccaacggcattcagcatttcttgctgttgcgcggcgtccggtccgatatggcgttcaataaaagcgccgctgttttcaagctggcttaacgtctgtgtcatgagcgatggttcctgaaacgtgcagtgaattgtgaacctctctccttacgaagagagtgagggtgaggcataaattttcctcaccctgatcctctcccgcagaagaggaataaagccgttactcgtcttctaacaatgcttcgtatgcggtcgcatccagcagactttccagttcgctttcatcgctggctttgattttaaagatccagccgcctgcatacggttcgctgttcaccagttccggggaatcgctcagtgcgtcgtttaccgccacgatttcaccgcttactggcgcataaatgtcactcgccgcttttacgctttcggcaaccgcgcagtcatcgcccgcgctaaccgttgcgcccacttccggcaggtcaacaaacaccatatcgcctaacagctcctgagcatgttcggtaataccaacggtgtaagtgccgtcggcttctttacgcagccattcgtgttctttgctgtatttcagttctgctggtacgttgctcatcaatcaatctccaaaaaagtaaatcacgcgacggctttgccgttacgcacaaaaacaggttttgtcactttaaccggcatttcacggttgcgaatttgcacaatcgccgtttcgccaataccttccggcacgcgcgccagcgcaatgctgtaacccagcgtcggggagaaagtaccgctggtgataatgccttcatgctggttgccctgcgcatcggtaaagcgtaccggcagttcattacgcagcacgcctttttcggtcatcaccagaccaaccagtttttctgtaccatgctcacgctgcacttccagggcttcacgaccgataaagtcacgatctgccggttcccaggcgatggtccagcccatgttggcggctaaaggagagatggtttcgtccatctcctgaccataaagattcatgcccgcttccagacgcagcgtgtcacgcgcgcccaagccacatggcttaacacccgcttccaccagcgcacgccagaaatcggccgctttttcattgggcagcgcaatttcatagcccgcttcaccggtataaccagtggtggcaataaacagatcgcccgcctgcacgccaaagaacggtttcatcccttccaccgcctgacgctgggcgtcattaaacagtgtggcagcttttgcctgcgcattcggcccttgcacggcaatcatggaaaggtcatcacgaacggtaatttcgatgccgaaaggttcagcgtgttgggtaatccaggagaggtctttttcgcgggtggcggagttaacaacgaggcggaagaaatcttcagtaaagtagtagacgatgaggtcatctatcacaccgccagaggcattcaacatcccgctgtaaagggctttgccgcttttggtgagcttcgccacatcgttcgccagcagataacgcagaaactcccgggtgcggctgccgcgaagatcgacgatggtcatatgactcacatcaaacattccggcatcggtacgtaccgcatgatgttcgtcgatttggctaccgtaatgcagcggcatcatccagccgtggaaatccaccatgcgagcgccgcaaagcgtgtgttgttcgtacaaaggagtctgttgtgccatcttgtcctcattgaataagcggggctgacaactttttcatggtgaaattatcaccacgaaacccagcatcggagccactcccggtccccaacgcaatcgttctcttttgcctgaacttaccaccgaaacagactgttaaccataaggtaaaattgatcatcacattagcttatggttaaaaaatgcaaaaatcgcgacagaataaaaaaccaaaaaatacaccagtttctatacaaagatgatgtgatgagaaagtcaatttgaataagacaatattaagagctaaaaaaatgtcaaaaaacactaaatcaaaaaataatggcattagaaaatataatgcgaaaacggaggtgaaattagtttatttcaaatgaggaaaatctcccggcgaaaaaaccgggagatgaaagtgtgatgggtatcaaataaacaacagaggagaaatttttaacgcagccattcaggcaaatcgtttaatcccattgcctggcggataagttgcggcttaacgccaggaagcgtgtcggccagtttcaaaccaatatcacgcagcagttttttcgccggattggtaccggaaaacagatcgcggaatccctgcataccagccagcatcaacgccgcactgtgcttgcggctacgctcatagcgacgcagataaatgtactgcccgatgtctttcccctgacgatgcaaccgtttcagttcggcaatcagctctgcagcatccataaagccgagatttaccccctgccccgccagcgggtgaatggtatgtgcggcgtcgcccaccagcgccagacggtggctggcaaactggcgcgcataacgccccgtcagtgggaacacctgacgcgcgctctcaaccttgcataagcccaggcgattatcaaaagcgatatttaacgcgcgattaaattcgtcttcacttgcctgctgcatccgctgcgcttcctctgggctcagactccagacaatgctgcaaagatgcggatcgctaagcggtaaaaaggccagaatgccttcgccatggaaaacctgccgcgccaccgcatcatgcggttcttccgtgcgaatggtcgctaccagcgcgtgatgctgataatcccagaaagtcagcggaatatcggctttgttgcgcaaccaggaattagcgccgtccgcgccaatcaccagacgcgccgttaacatgctgccatctttcagcgtcaggaaggtttcattttctccccaggcgacctgctgtaattctgcgggggctaacagagtgatatcactgctctgatgcgctttgttccacagcgcgtagtgaatcacactattttcaacgatatgcccaagatggctatagcccatgctttgatcgtcaaagctaatgtgaccaaagctgtctttgtcccacacttccataccgtgataacagctggccctacgagagagaatgtcctgccagacgccaagacgggtgagtaatttttcgctggcggcattgatagcgctaacgcgcagttgtggtggtgcattcgccgccagaggttcctgtacgcgctgctccagtacggcaacgcgtaagccgctcccctgtaagccacaggcaaccgccagccccaccatgccgccgccaacaatggctacatcaacactttgcattgtttattccttaaaaccgccttcaacgcgccacccaaccgagggtgcgctgcgccagcacatcgcgtgccggggtgaataattccatcgtcatcagcccgatgttgcgcccgacaaccagcggtgcccaacggttggcaaaaagatgtacaaggctgtccgtgacgccaatggttgcttcgcgatcgctctgtcgacgctgctgataacggcacaatacgccgtaatcccccatgtcttctccgcgctcctgcgcctgagtcagggtttccgcaagactcatcacatctcgcataccgaggttaaacccttgcccggcaatcgggtgcagagtttgcgccgcattgcccaccagcacggtacgatgggtaatagatctggcggcgtgggttaacgccagcggataagcactgcgtttaccagcgtgggtaattttcccaagtcgccagccaaaggcgctctggagttcacggcaaaacttctcgtcactccagctcaacacctcttcgcgccgttccagtggatgacaccagaccaggctacagcgtccgtcagacatcggcaacatcgccagcgggccatgttgcgtaaagcgttcaaaagcgcgcccttcatgcgcaacggaagtagcaacgttggcaatcacggccagttgttcgtaaggctcctgctgccagtcaacgccgcacgcggtggctaacgcactatgggtgccatcagctgctaccagcacgcggcccgtcagcgtctcgccactctccagcgtcacttcaacgtgactctgagtacgggcaacgttagccacgcgatcagggcaatgcagcgttacgccaggtgctttacgcagcaatgcaaacagccgttgcccgacattgtgcaattcgacaacctgtcccagcgccgccagttggtaatcttctgcggcgagggtgacaaatccagcgtgaccacgatcgctgacatgcacggtggtgatggcagttgcgcaatccgccagagattgccagacgccgatgcgcgccagttgctgacaggtacccgccgccagcgctatcgctcgtccatcaaagcccggatgagcatgactctctggcgcagtcgcttcaatcaaatgtaccggcagcgccccgtgacttaaccgggaaatagccagcgccagcgtcgcgcccgccatgccgccaccgacgatgattacgctcattgctttctcgcagcaaccatcaacgcttcgatttcttccggctttttcaccacgctggcggtgaggttttcgttaccggtttcggtaatcacaatgtcgtcttcaatacgaatgccgataccgcgatattgttctggcacttctgcatccggcgcaatatacagccctggttctacggtcagtaccatgcccggttccagaatgcggctgcgatcctgaccataaacacccacgtcatggacatccagtcctaaccagtggctaaggccatgcataaagaaaggacgatgggcgttctgagcgatcagttcatcaacatcacctttcaggatgccgagttttaccaggccgctaaccatgatgcgcaccacttcaccagtgacttccagaatggaagttcccggacgatacaggcgcaggctggtttcgagagactccagcacaatgtcgtagatttcacgctgggcctgggtgaatttgccgttgaccgggaaggtgcgggtaatatcgccagcgtaacctttgtattcacaacccgcgtcaatcaacaccaggtcgccgtcgcgcatttcacactcgttttcggtgtagtgcagaatgcagccgttttcaccgctgccgacaatggtgttataggacggatagcgcgcaccgtggcggttaaattcgtggtgaatttcgccttccagatggtactcgaacattcccggacggcatttttccatcgcccgtgtatgtgccatggcggtgatttctcccgcgcggcggagtacggcaatctcttctgggcttttgaacaggcgcatttcatgaacaacaggacgccagtcgatcatcgttgccggtgcggtgagattttgccggctacctttacgcagtttttccagcgcactgttcacgattacatcagcatatgcatattcgccctgggcatggtaaaccacatccaggccgttaagtagttgataaagttgctgattgatttcgctgaatgccagtgcgcggtcaacgcccagtttctctggcgcggcatcctggcctaagcgacggccaaaccagatctccgccgtcaggtcgcgaacgcggttaaacagaacgctgtggttatgagtgtcatcgcttttaatcagcaccagcaccgcttccggttcgttaaagccggtgaagtaccagaagtcactgttctgacgataggggtattcgctgtcggcgctacgtgttacttctggtgcagcaaaaatcagcgcggcgctgccgggttgcatttgctccaccagggcctgacggcgacgctgaaactcttgccgggatatctcactcataacactctccttacgttttttgtttttagtgtagagtcggtttttgtacttctggcgcggtcggttgcggatgagtaaaggtgtcgtggcataacagcgcggcaacacgaacgtattcgatgatctcttcaaggctcatttcaagctcttcctgatcttcgtcttcgtcgtaacccagttgcgcaatgttacgcagatcgtcgatagcttcaccggtttcgccggtcactttatccagcttcggttgcgtaacgccaagaccaagcaggaagtgattgacccaacctgccaatgcatcagcccgatcgaaaacgctgacatcatcgccatcaggcagataaagctgaaaaaggaagccgtcatcctgcagggcatcgctggtggcagagtgcattttacgcagtgcctgtgccagctcatgaccgaaagccatgccttcgttcgtcaggtcgtgaagtagcggtagccaactgctgtcatcgttaccgccacatatcatcccgctgattaaaccatgcatctcagctggggtcagacccgtcccttgttggttcagatactggttcatttcgttgtaaccaggcatttcgttctgtatagacataagcattcgtcgtcaaagggaggaatattcatgatatgctaccactttgggccctggtggaccagaaaagggcttgtctcttctcatcagggtagctatagtgtcgccccttcgcagaccatgggtctaaagacgaaggcagcgcagtcaatcagcaggaaggtggcatgtctgcacaacccgtcgatatccaaatttttggccgtagtctgcgtgtgaactgcccgcctgaccaaagggatgcgttgaatcaggcagcggacgatctgaaccaacggttgcaagatctgaaagaacgcactagagtcacaaatactgaacagttggtcttcattgccgcattgaatatcagctatgagttagcgcaagaaaaagcaaagactcgtgactacgcggcaagtatggaacagcgtattcggatgctgcagcagaccatagaacaagcgttacttgaacaaggtcgcatcaccgaaaaaactaaccaaaactttgaatgacacttttcggtttactgtggtagagtaaccgtgaagacaaaatttctctgagatgttcgcaagcgggccagtcccctgagccgatatttcataccacaagaatgtggcgctccgcggttggtgagcatgctcggtccgtccgagaagccttaaaactgcgacgacacattcaccttgaaccaagggttcaagggttacagcctgcggcggcatctcggagattcccttcttatctggcaccagccatgacgcaactaccagaactcccactgacattatcccgacaagaaatccgcaaaatgattcggcaacgtcgtcgtgcgttaacgccggaacaacagcaggaaatgggtcaacaagccgctacccggatgatgacttatcccccggtggtgatggcacatacggtcgctgtattcctctcttttgatggcgaactcgacacccagccactcatagaacaactctggcgcgccggtaagcgcgtatatcttccagttttgcatccctttagtgccggtaatttgctgttcctgaattaccatccgcaaagcgaactggtgatgaacaggttgaagatccatgagccaaaattggatgtgcgtgacgtgctacccctttcccgattagacgtgctgatcacaccgctggtcgcctttgatgagtacggtcagcgcctgggaatgggcggtggtttttatgatcggaccttacaaaactggcagcactataaaacgcaaccggtgggttatgcgcatgattgtcagttggtggaaaaactccccgttgaagagtgggatatccctcttcctgcggtggttacaccgagcaaagtctgggagtggtaagggcgatacacccgcatcgccctgattgacatcgttgattctttgacctaatttagtgagtaagggtaagggaggattgctcctcccctgagactgactgttaataagcgctgaaacttatgagtaacagtacaatcagtatgatgacaagtcgcatcataacccttctccttcaagccctcgcttcggtgagggctttaccgttacagccccatgctgccctgccatcgtaaatccccattaaataaacacaacgcattgatctgactttgatttattttctggagcagactcgcaaagtagaatgcgcaacgcggcaacggtgtggagaagggataaaaaaacgggcaagtcagtgacctgcccgttgattttcagagaaggggaattagtacagcagacgggcgcgaatggtacccggaatagctttcattgcctgcagcgctttttcggcaacgtcttcgtcggcttcaatatcaataaccacataacccatctgggcggaagtttgcagatattgcgcggcgatgttgacgccctgctcggcgaagattttgttcagcgcagttagcacgcccggacggttttcgtggatgtgcatcagacgacgcccaccgtgcagtggcaggctgacttccgggaagttcaccgcagagagcgtactgccattgtcagaatacttgatcaatttacccgcaacttccaggccgatattctcctgcgcttcctgagtgctaccgccaatgtgtggcgtcagaaggacgttgtcgaattcacacagcggagaggtaaatggatcgctattggtcgccggttccgtcgggaatacgtcgattgccgcccccgccagatgtttgctcgccagcgcatcacacagcgccggaatatccaccacagtaccgcggctagcattaatcagcaggctgccgggcttcattagactaatttctttcgcgcccatcatatttttggtggacggattctctggtacatgcagactcaccacatcgctcatattcagcaggtcagaaagatgctgtacctgagtggcgttgcccagcggcagtttattttcaatatcataaaagtaaacatacattcccaggctttcagccagaatgcccaattgcgtaccaatatgaccgtagccgatgatacccagctttttgccgcgcgcttcaaaagaacccgccgccagtttgttccacacgccacggtgcgctttagcattggcttccggcacgccgcgcaatagcagcagcagttcgccaatcaccagctccgcaacagagcgcgtattactgaacggtgcgttaaataccgggatcccgcgctttgccgccgcatccagatcaacctggtttgttccgatacagaaacagccaatagcgaccagtttttctgcggcgttgatcacgtcttcagtcagatgggtacgggatcgcaggccgatgaagtgggcatcgcggatggattcttttaattgttcatcatccagcgcgcctttgtgaaattcgatgttggtgtaaccagctgcacgaaggctttccagcgccttttggtgcacgccttctaccagcagaaacttaatcttgtctttctccaggcttacctttgccatttacccaatcctgtcttttgaaatgttgtgtgcggatttgcatccgcctttcaacatatcaaaaaataatattgcggcaatatgaacgtttgcgtcgcgatgttgaggaaatatcacgcaaaggtaattcttggatgaatatgctggtttagaggatttatttagagcaatcgacaattgcctggtaaaagcgtgacacatgtcaccaaatttaatgaagagaatttttttaacgggggaggttcccccgtcagatcatttcacaatggttttgacaccgtcaggtgtgccaatcagcgcaacgtccgcgccacggttagcaaacaagccaacagtcaccacgccaggaatcgcatttatggcgttttccatcgctatcgggtcaaggatttccatgccgtggacgtcgaggatcacgttgccattatcggtcaccacgccctgacggtattccggacgaccgcccagtttcaccagctgacgcgccactgcactacgtgccatcgggataacttctactggcagcgggaatttacccagaatatcaacctgcttggaagcgtctgcaatacagataaatttttctgcaacgctagcaatgattttttcacgggtcagcgccgcgccgccgcctttgatcatttgcatgtggccgttgatttcatctgcgccatcaacgtagatgccaaggctgtcgacttcgttgagatcaaaaacgtgaatgccgaggcttttcagtttttcagtggaagcatcactactggaaacggccccttcaatctggcctttcattgtaccgagcgcgtcaataaagtgtgcggcggtggaacctgtacctacaccaacaatggtgccgggctgaacatactgaagtgccgcccatcctactgcttttttcaattcatcctgcgtcatgatcgtttcgcctgtggtatgaaatttcacacgcattatatacaaaaaaagcgattcagaccccgttggcaagccgcgtggttaactcatccataaaatatcgcgcaatggcaggcatcccctttcgccccgcaaataaagcatacaacggtctgggtatgccgctccacggtgcaaacaggcgcaccagttcaccgttcgcaagcccctgtttacaggcaaattgaggcaataacgccacgccattcaacacaaccagggcgcgaactcgctgagcgaaatgcattagcgcaaatccctgatcttttaagctgcgcttttaaccacggatacaaatgttacccgccgacggcttcggtatatgcaacctgacacaaaattgtgtcatagtgcaggaaaaagcatttaccaggagcagacaacagcaatgaaacgcccggactacagaacattacaggcactggatgcggtgatacgtgaacgaggatttgagcgcgcggcacaaaagctgtgcattacacaaagtgccgtcagtcagcgcattaagcaactggaaaatatgttcgggcagccgctgttggtgcgtaccgtaccgccgcgcccgacggaacaagggcaaaaactgctggcactgctgcgccaggtggagttgctggaagaagagtggctgggcgatgaacaaaccggtagcactccgctgctgcttagtctggcggtcaacgccgacagtctggcgacgtggttgcttcctgcactggctcctgtgttggctgatagccctatccgcctcaacttgcaggtagaagatgaaacccgcactcaggaacgtctgcgccgcggcgaagtggtcggcgcggtgagtattcaacatcaggcgctgccgagttgtcttgtcgataagcttggtgcgctcgactatctgttcgtcagcagtaaaccctttgccgaaaaatatttccctaacggcgtaacgcgtagcgcattactgaaagcgccagtggtcgcgtttgaccatcttgacgatatgcaccaggcctttttgcagcaaaacttcgatctgcctccaggcagcgtgccctgccatatcgttaattctagtgaagcgttcgtacaacttgctcgccagggcaccacctgctgtatgatcccgcacctgcaaatcgagaaagagctggccagcggtgaactgattgacttaacgcctgggctatttcaacgacggatgctctactggcaccgctttgctcctgaaagccgcatgatgcgtaaagtcactgatgcgttactcgattatggtcacaaagtccttcgtcaggattaatccatcaaataatgcctgatagcacatatcaggcgttgtcctcacttctttttgtattccttgaatcacatcacaaaatagacaaatctcaggcggcaaaaaacgacgtctgaatgcattttttttgctggcgacaaacccacgtaaaaagctcaccgtaggcgcaaataccctcattttgattgcgttttacggagcaaataatgtctaacgtgcaggagtggcaacagcttgccaacaaggaattgagccgtcgggagaaaactgtcgacagcctggttcatcaaaccgcggaagggatcgccatcaagccgctgtataccgaagccgatctcgataatctggaggtgacaggtacccttcctggtttgccgccctacgttcgtggcccgcgtgccactatgtataccgcccaaccgtggaccatccgtcagtatgctggttttagtacagcaaaagagtccaacgctttttatcgccgtaacctggccgccgggcaaaaaggtctttccgttgcgtttgaccttgccacccaccgtggctacgactccgataacccgcgcgtggcgggcgacgtcggcaaagcgggcgtcgctatcgacaccgtggaagatatgaaagtcctgttcgaccagatcccgctggataaaatgagcgttagcatgaccatgaatggcgcagtgctaccagtactggcgttttatatcgtcgccgcagaagagcaaggtgttacacctgataaactgaccggcaccattcaaaacgatattctcaaagagtacctctgccgcaacacctatatttacccaccaaaaccgagtatgcgcattatcgccgacatcatcgcctggtgttccggcaacatgccgcgatttaataccatcagtatcagcggttaccacatgggtgaagcgggtgccaactgcgtgcagcaggtagcatttacgctcgctgatgggattgagtacatcaaagcagcaatctctgccggactgaaaattgatgacttcgctcctcgcctgagcttcttcttcggcatcggcatggatctgtttatgaacgtcgccatgttgcgtgcggcacgttatttatggagcgaagcggtcagtggatttggcgcacaggacccgaaaagtctggcgctgcgtacccactgccagaccagtggctggagcctgactgaacaggatccgtataacaacgttatccgcaccaccattgaagcgctggctgcgacgctgggcggtactcagagtctgcataccaacgcctttgacgaagcgcttggtttgcctaccgatttcagtgcacgcattgcccgcaacacccagatcatcatccaggaagaaagtgaactctgccgcaccgtcgatccactggccggatcctattacattgagagcctgaccgatcaaatcgtcaaacaagccagagctattatccaacagatcgacgaagccggtggcatggcgaaagcgatcgaagcaggtctgccaaaacgaatgatcgaagaggccagtgcgcgcgaacagagcctgatcgaccagggcaagcgtgtcatcgttggtgtcaacaagtacaaactggatcacgaagacgaaaccgatgtacttgagatcgacaacgtgatggtgcgtaacgagcaaattgctagcctggaacgcattcgcgccacccgtgatgatgccgccgtaaccgccgcgttgaacgccctgactcacgccgcacagcataacgaaaacctgctggctgccgctgttaatgccgctcgcgttcgcgccaccctgggtgaaatttccgatgcgctggaagtcgctttcgaccgttatctggtgccaagccagtgtgttaccggcgtgattgcgcaaagctatcatcagtctgagaaaagcgcctccgagttcgatgccattgttgcgcaaacggagcagttccttgccgacaatggtcgtcgcccgcgcattctgatcgctaagatgggccaggatggacacgatcgcggcgcgaaagtgatcgccagcgcctattccgatctcggtttcgacgtagatttaagcccgatgttctctacacctgaagagatcgcccgcctggccgtagaaaacgacgttcacgtagtgggcgcatccagtctggctgccggtcataaaacgctgatcccggaactggtcgaagcgctgaaaaaatggggacgcgaagatatctgcgtggtcgcgggtggcgtcattccgccgcaggattacgccttcctgcaagagcgcggcgtggcggcgatttatggtccaggtacacctatgctcgacagtgtgcgcgacgtactgaatctgataagccagcatcatgattaatgaagccacgctggcagaaagtattcgccgcttacgtcagggtgagcgtgccacactcgcccaggccatgacgctggtggaaagccgtcacccgcgtcatcaggcactaagtacgcagctgcttgatgccattatgccgtactgcggtaacaccctgcgactgggcgttaccggcacccccggcgcggggaaaagtacctttcttgaggcctttggcatgttgttgattcgagagggattaaaggtcgcggttattgcggtcgatcccagcagcccggtcactggcggtagcattctcggggataaaacccgcatgaatgacctggcgcgtgccgaagcggcgtttattcgcccggtaccatcctccggtcatctgggcggtgccagtcagcgagcgcgggaattaatgctgttatgcgaagcagcgggttatgacgtagtgattgtcgaaacggttggcgtcgggcagagcgaaacagaagtcgcccgcatggtggactgttttatcagcttgcaaattgccggtggcggcgatgatctgcagggcattaaaaaagggctgatggaagtggctgatctgatcgttatcaacaaagacgatggcgataaccataccaatgtcgccattgcccggcatatgtacgagagtgccctgcatattctgcgacgtaaatacgacgaatggcagccacgggttctgacttgtagcgcactggaaaaacgtggaatcgatgagatctggcacgccatcatcgacttcaaaaccgcgctaactgccagtggtcgtttacaacaagtgcggcaacaacaaagcgtggaatggctgcgtaagcagaccgaagaagaagtactgaatcacctgttcgcgaatgaagatttcgatcgctattaccgccagacgcttttagcggtcaaaaacaatacgctcagtccgcgcaccggcctgcggcagctcagtgaatttatccagacgcaatattttgattaaaggaatttttatgtcttatcagtatgttaacgttgtcactatcaacaaagtggcggtcattgagtttaactatggccgaaaacttaatgccttaagtaaagtctttattgatgatcttatgcaggcgttaagcgatctcaaccggccggaaattcgctgtatcattttgcgcgcaccgagtggatccaaagtcttctccgcaggtcacgatattcacgaactgccgtctggcggtcgcgatccgctctcctatgatgatccattgcgtcaaatcacccgcatgatccaaaaattcccgaaaccgatcattagcatggtggaaggtagtgtttggggtggcgcatttgaaatgatcatgagttccgatctgatcatcgccgccagtaccagtaccttcagtatgacgcctgtaaacctcggcgtcccgtataacctggtcggcattcacaacctgacccgcgacgcgggcttccacattgtcaaagagctgatttttaccgctagcccaatcaccgcccagcgcgcgctggctgtcggcatcctcaaccatgttgtggaagtggaagaactggaagatttcaccttacaaatggcgcaccacatctctgagaaagcgccgttagccattgccgttatcaaagaagagctgcgtgtactgggcgaagcacacaccatgaactccgatgaatttgaacgtattcaggggatgcgccgcgcggtgtatgacagcgaagattaccaggaagggatgaacgctttcctcgaaaaacgtaaacctaatttcgttggtcattaatccctgcgaacgaaggagtaaaaatggaaactcagtggacaaggatgaccgccaatgaagcggcagaaattatccagcataacgacatggtggcatttagcggctttaccccggcgggtagcccgaaagccctacccaccgcgattgcccgcagagctaacgaacagcatgaggccaaaaagccgtatcaaattcgccttctgacgggtgcgagtatcagcgccgccgctgacgatgtactttctgacgccgatgctgtttcctggcgtgcgccatatcaaacaagctccggtttacgtaaaaagatcaatcagggcgcggtgagtttcgttgacctgcatttgagcgaagtggcgcaaatggtcaattacggtttcttcggcgacattgatgttgccgtcattgaagcaagcgcactggcaccggatggtcgagtctggttaaccagcgggatcggtaatgcgccgacctggctgctgcgggcgaagaaagtgatcattgaactcaatcactatcacgatccgcgcgttgcagaactggcggatattgtgattcctggcgcgccaccgcggcgcaatagcgtgagcatcttccatgcaatggatcgcgtcggtacccgctatgtgcaaatcgatccgaaaaagattgtcgccgtcgtggaaaccaacttgcccgacgccggtaatatgctggataagcaaaatcccatgtgccagcagattgccgataacgtggtcacgttcttattgcaggaaatggcgcatgggcgtattccgccggaatttctgccgctgcaaagtggcgtgggcaatatcaataatgcggtaatggcgcgtctgggggaaaacccggtaattcctccgtttatgatgtatagcgaagtgctacaggaaagcgtggtgcatttactggaaaccggcaaaatcagcggggccagcgcctccagcctgacaatcagcgccgattccctgcgcaagatttacgacaatatggattactttgccagccgcattgtgttgcgtccgcaggagatttccaataacccggaaatcatccgtcgtctgggcgtcatcgctctgaacgtcggcctggagtttgatatttacgggcatgccaacagtacacacgtagccggggtcgatctgatgaacggcatcggcggcagcggtgattttgaacgcaacgcgtatctgagcatctttatggccccgagcattgctaaagaaggcaagatcagtaccgtcgtgccaatgtgcagccatgttgatcacagcgaacacagcgtcaaagtgatcatcaccgaacaagggatcgccgatctgcgcggtctttccccgcttcaacgcgcccgcactatcattgataattgtgcacatcctatgtatcgggattatctgcatcgctatctggaaaatgcgcctggcggacatattcaccacgatcttagccacgtcttcgacttacaccgtaatttaattgcaaccggcagcatgctgggttaatgactcgtcccgtcacgatcttcagcaatatgctgaagcatcgtggcggtataacgatgatttctgatactataaagatattcctgcatatacatcggcctgtgcggtgcatcaaaatatttcagcgttgccggattcaccagtcgccaggcaaaatgcgggatcaccgtcagaaaatgtccgcgctccacggcgctgattttggccataaaactgtagggacgataaataatggttggattgatcccacaaggtcgcatattcgcatcaatcattgcttcgaagttggcccggttctgaaagcgcatttgtagccagggcagctcctgaagcagctcttgctcttgtcgctcttcataacggcgagaaacgagaaagcctaatcgcagcggtggtagttcactgatagtcaggttttccagttcctgaactcgtgcagatacatgctgtggggagataataaaatctaactggcggtcaaaaagattatcgataacgccattttcgctgaactcaactggctgggcggtcacgccttcatacttatctccgagactaatcaactgatcgaaaataattgtcggataagtattatctatgccaatcacaatttctcgactacgacgcccactgttatggatttcattatcaatcgcagaaagccgttgataaaccgggaacagtttttgatacagttcctgtccggctttattgaggctgatattattatctttgcgggtaaatagcgtatagccaatttgttcttccagcgcggcaatgcttttaccaaatgggctagccgtcatatggattttttctgccgcccgggcaatattattggtttgcgctaataaaatgaaattgcgcatctttttgctaataaaaatgtccatccccctcccccgcatccttgtccgcttaaccgtttcagtcagcctatccttgatgaaaccgcgagcaaagataggtgattacgtcatggttttacagaaaattacagaaaaaggaggcaatatcgggtaaaggcattagcccgacgaatacgtcgggctacaaatattattgtgctgcaggtgttttagcgggttgttgatccacaggttctaactggaagaccacatcgacctgatcatcaaactgaatagcggcctgctcgtaagtttcctgggcggacaccggcgcggcatcggctttcatcatccgcaccattgggctgggctgatagttggaaacatggtagcgcacgctatataccggccccagtttacgatgaaagccgttcgccagttcctgcgcctgatgaatcgcgttatcaatcgctgccttacgcgctttgtctttataggcatccggctgcgccacgcccaggctcacagaacgaatttcgttaagacccgccttcagcgcgccatccagcaaggaattcagtttgtctaactgacggagcgtgacttccaccgttctcacagcgcggtagcctttaaggatacttttaccatcctgataatcataatctggctgggtgcgtaagttcgcactgctgatatcttttttcgcgatctgattgagttcaaggaaggaaatgtattgtgcgacgcgctcatctgcctgtttcttggcagtagcggcatccttcgcggccacgttaacttcaatcgcaagagtggcaatgtctggcaccgcatccacgcttgccgtaccggaggtgacaatatgcggtccatccggcaattcgttagcctgcgctgccatcccgctaatacccattaatgccgccagggcgataactttgaacttcacgttagtctctccgtgttaattgacttgcccaaaattcaggacctctggaggcaagcttagcgcctctgttttatttttccatcagatagcgcttaactgaacaaggcttgtgcatgagcaataccgtctctcgccagctgcaaggcaataaaccacataacacatcccacaaccagattgataatgcgctgtgcttttgccgtgcgcagacgcggtgccagccaggctgcgagaagagccagaccaaagaaccacaggaaagaggcgctaattgtcccgagtgcaaaccagcgttttggttccacatcaagttgcccgccaaggctgcccagtacaacaaaagtatccaggtaaacatgcggattcagccaggtcactgccaacatggtggcgataattttccatctgccttgcttcatgacttcggcgctggctaactcaatattactgctcattgctgttttaaaagcgccaaaaccataccacagcaagaaggctacgccgccccaggtgaccagcgccagcaaccacgggctctgcatcaataacgcgctgccaccaaaaatcccggcgcaaatcaggaccaaatcgctgatagcacaaagtaaggcaatcataatgtggtactgacgacgtatgccctgattcatcacaaaagcattttgtggaccgagcggtaggatcatagccgccccaagtgcaagaccttgaaagtaataagaaaacacgttggatattccgaattaagtatctgatgcagagactatatcgcgggattgttattagcggaaattgataatattaattggcaatcagaaaaactaataagagagaggccagagagtattatctggcctcagcgttgattacgcagctttgtcttctttcacccgcttaaagttcacatccatttgcgggtacgggaagctgataccggcggcatcaaattcacgtttaatacgctccagcacatcccagtacacgttttgcagatcgccgctgttgctccagacgcggaccacgaaattaatgctgcttgcaccaagttcgttcaggcgcacagtcatttcgcgatctttcaaaatgcgatcttcagactggataatattggtcaggatctgcttaacctgatcgatatcggaatcatacgccacgccaataataaattcgttacggcgaactggctcgcgggagaagttaataatatttccggcaataattttaccgttcggaataacgataattttaccgtctgcagtacgcatggtggtggagaaaatctgcacactcagcacagtaccggctacgccgcccaggtcaacatattctccggcacggaacgggcggaacatgacaagtaacacgccagcggccaggttagacagactcccctgcaaagccagaccaacagctaagcctgcggcaccgagtacagcaatgacactcgcggtttgtacacccacgcgtcccagtgcagcgattagcgtaaaggcgataataccgtaacggactaatgcagaaagaaaatcagcaacagtggcatcgattttacgggagatcatcaggcgattcaccgcgttggaaatcatccgcgcgataatcaaaccaacgatgatgatcgcgagtgccgccacgatgtttactgcataacttagcagcagcgcctggttagctaccagccagcttcccgcgccgtttatgctatcgacaacattcaaatcttccattcaatattccttttcaactgactcaaaatggagaaatacactccgccgccttatgacgggcagtctgacaagggtaaacaataaagcataattttgccaaatagatcacagatttctcatctgaatcaccttgcttttggcgaaaaaatccccgcagagcggggctcagacagatatcaatgtgcgctttgtcatgccggatgcggcgtgaacgccttatccggcctacaaaaacctgcaaattcaatatattgcaggatacgtgtaggcctgataagcgtagcgcatcaggcaattttgcttttggcgaaaaaaagacccgcagagcgggccttgagataagcagaaaggaatatcttacagaacgtcgatcgcgttcagttcctggaatgctttctccagacgagcgatcatgctagtctgaccggcacgcagccatacgcgcggatcgtagtatttcttgttcggctgatcttcgcctttcgggttacccagctgaccctgcagataagcttcgttcgctttgtagtagttcagaacgccttcccaggttgcccattgggtatcggtatcgatgttcatttttactacgccgtagcttacggagtctttgatttcctgagcagtagaaccggaaccaccgtggaatacgaagttcaggctgttgtgcggcaggttgtgtttcttggaaacatattcctgagaatcacgcaggatggtcggagtcagaaccacgttacccggcttgtaaacaccgtgtacgttaccgaaggacgctgcgatggtgaaacgcgggctgattttgctcagttcggtgtatgcgtaatcaacgtcttccggctgggtgtacagtgcagaagcgtccatgtggctgttgtccacgccgtcttcttcaccaccggtgcaacccagttcgatttccagagtcatgccgattttggacatgcgctccaggtatttagagcagatttcgatgttctcttgcagagattcttcagacaggtcgatcatgtgagaagagaacagcggcttaccggtagctgcgaagtgtttttcacccgcgtccaacagaccgtcgatccacggcagcagtttcttcgcgcagtggtcagtgtgcaggataaccggaacaccataatgttcagccatctggtgaacgtgatgcgcaccagagatcgcgcccaggatagcagcaccctgcggaacgtcagatttcacgcctttaccagcgataaaggaagcaccaccgttggagaactgaacgataaccggcgctttaactttagcagcggtttccagtacggcgttgatggagtcagtaccgacgcagtttactgctggcagtgcgaagttgttttcttttgctacctggaaaactttctgtacgtcatcaccagtgattacgccaggttttacgaaatcaaaaatcttagacatgtctcttgtcctgtatcgtcgggccttatactcgtcatacttcaagttgcatgtgctgcgtctgcgttcgctcaccccagtcacttacttatgtaagctcctggggattcactctcttgtcgccttcctgcaactcgaattatttagagtatgaaaaattgcgtgctctaaaagcgcgctgaaacaagggcaggtttccctgccctgtgattttttacttcttagcgcgctcttcgagcatcgctactgcaggcagtactttaccttccacgaattcgaggaatgcgccgccgccagtggagatgtaggagattttgtcagcaatgccgaacaggtcgattgctgccagagtgtcgccgccgccagcgatggagaacgcttcgctgtctgcgatagcgttagccacgatttcagtacctttgcggaagttcgggaattcgaacacgccaaccggaccgttccacagaatggttttcgcattcttcaggatttcagccagttcctgagcggaagcatcaccgatatccaggatctgctcgtcagctttcacatcgttaacagatttcagggtagccggtgcagtttcagagaactcggttgctacgcgaacatcagacggaaccgggatgttgcaggtggtcagcagacgtttagcttcgtcaaccaggtcagcttcgtacagggatttacccacatcgtggccttgtgccgcgataaaggtgttagcgataccaccaccaacaatcagctggtcagcgattttagacagggagtccagaacggtcagtttggtagatactttagaaccaccaacgatagccaccatcgggcgagcaggttctttcagtgctttacccagcgcgtccagttcagctgccagcagcgggcctgcgcacgcaacgtcagcgaatttaccgataccgtgagtagaagcctgcgcgcggtgagcagtaccgaatgcgtccattacgaacacgtcacacagtgcagcgtattttttggacagggtttcgtcgtctttcttctcgcctttgttgaagcgaacgttttccagaacaaccagttcaccttcagcaacgtcaacgccgtcgaggtaatctttaaccagacgaaccgggttagacagtttgtctttcaggtagttaacaaccggcagcagagagaattcttcgttgtactcgccttcggtaggacgacccaggtgggaagttaccatcacttttgcgccttgtttcagggccagttcgatggtcggcagagaagcacggatacgcgcgtcgctggttactttcccgtcttttactggtacgttcagatccgcacggataaatacacgtttcccagcaagatccagatcggtcatcttaattacagacatggtgaatcctctcgttgattctaaaagttttgcagacgctgcttgcgtcttacctgaaagcaacagtagccatagctaacgtcgtgtcgagcattcggttagcaaagccccattcgttatcgcaccagaccaacgttttgatcaggtgtgcgccactgacccgggtttgggtgccatcgacaatggcactgtgcggatcgtggttaaaatctacagagaccaacggcaattccgtatagtcaactataccatgaaatgcaccttgtgctgctttttgcagcaacaggttgacttcattggcttttacaggtttcttcaccgtcacgcttaaatcgattgccgtcacatttatggttggcacacgtaccgcaatcgcttcaaagcgatcgttaaattgcggaaaaaatcgtgtgataccggcggccagtttagtatcgaccggaatgatgctctggctggctgcccgggtgcgacgcaggtcaggatggtatgcatcaataacctgttgatcgtgcatggcggagtgaattgtggtcacagtgccggactcaataccgtacgcatcatctaacaatttgatgacgggaattatgcaattcgtggtacaggaagcgttagaaacgatgcggtgttccgcacgaagttgatcctgattgacgccgtaaacaacggtcgcgtcgagatcgttactgccaggatgactaaagagcacttttttggccccggcggcaatatgcgcttcgccatgctcgcgggagccatatacgccggtgcagtcgaggactacatcaacgccaagttcacgccaggggaggctttgcagactacgttcatgcaatacgcggatggcgtcatcaccaacaaaaagttgatcgcgttcctgtcgtacttcccatgcaaaacggccatggctggtgtcatatttcaacaaatgcgccatgcccgcagcatccgccagttcgttgattgccaccacggtaatttccgcccggcgtccggattcatacaaagcacgaaccacattacgcccgatgcgaccgaagccatttatcgctacgcgtacggtcatagatctcctgcaaggttttccctgagcaaatttgccagacagagtaatccagcaaatcgtccggggaaaccttacctgtcgcaaactgcgactgattggttaattgtcgaacatttaatcgactgaaacgcttcagctaggataagcgaaacgtggaataaaaggaatgtttgtccagccgaagaagacatttatctgactcacatcacacttttatccccttttgtgggaagctttattccaggctggcgtaataataaccctacaataactggaataaattgtcagcttgtgaagtgataccggccttcttcagtcatctctactatcagattggcctgacggctattcatcagcacacgctcgacattggggccatcggtgcgggcataaaatgcttcggctacttgccgcgttaatcctcccgcaattttacgactaatcaagcgctcccgcagaatttgagcaggtgcatgaataaaaatagaaaaatcgcagaaagatgccaactccagccacttttcatcatccagtaacaaccagtttccttcgacgatgacgagtggtgcggtaacgtgcaacgcatcttcaacaggatcatgcttttgtcgatcgtactgcggccacgtacaatccccttccacgacctggcgcagattttccgtcagtttcgcaacgtcaaatgtctctggtgcgcctttgaaggggcgcaattgatgcgcatccagccagctattgtaatggtgaaaaccatccatcgggagcgtctgaatagcgggcagttccgggtcttgttgcgcgagatattcccagaaggtggttagggtacttttacccgtccccggcggagcgcaaagaaaaaccaccgtacgccgctgcggatttaccgtctgtaaggccgccaacatgtgcagcaacggtttatgtacattttcaatctcttcgttctggtactgtgcctgtatcttcagcccattcaccgttaattcaattttcacggcgttaattcctttaaggtggtcgttactgccagcgtcagcgccgttttgaccattccgctaaaacgcgcctcactccagacggagaaatcagcgaacttcatcgcttttaacgcgtcatagagcatcgcattgcgggttatgctattgacgttgctgataaaatcccaggtcatgtcatcggcaaatccgggcgtttcatcctgttcgttcaggtaatgccagaactgggaaaaatgcgtgatatcggcgtacaaccatttatccattttcccaacgcataaatcaaacgcagtgcaacatcaatatcgtcaagcgggccgctttgggcgagtaacggcttcactgcatattccacgatctcttcatcgttatcgacaaacaggctcggcagaaactggcgtatcccctggagcaaaatggtatgcgcagttttcataaaactaaataaattgtcctgtgcatccagttgctcaagcacatcatcttctgtcagcgtcgccattggtcttccgatagatcaccatcaatgcagggagtctattatattacacgtttggtccgcgccgccgatcagtaatgtctgcgtccgcaccccattcgccgtctgttggataccgttcaccagctcaccgcccgtcacgcccgtagcgctaaagaggatatcgttccccctcaccagttcatcgaggctgtacacacggttaacgtcaacgcccattgccttgcaacgcttgcgctcctgctctgcaatctgccgattttccgtgtaatcccctttagcctggcaaaagtcaatcagctcggcctgcatatccccgcctaatgctttaacggcacaggcagaaatcacgccttctggcgcaccgccgatggtgtacatcacatcgtaaggattatcctgccagcaggtcagcacgctggcggcgacatcgccatccggcagggcaaaaaccttcacgcccagctgtgttgcttcctcaatcgcggcactcaggcgcggtttatccagcgtaaccatgcgcagcttatccagcggtttgcctaacgctttcgccacgttgcgcaggttgtccgtcagaggcaaagacagatcaatcgcgcccgccgccagccgattaacaaccagctttttcatatacatatcgggcgcatgtaacaggctatctcgaggggcgaaagccatgaccgccagcgcattgctctgccccatcgccaccatccgcgtgccttcaatgggatcaaccgcgatatcgacttctggcccatcgcctttgcccacctcttcgccaatccacagcatcggcgcatggtcaatttctccttcgccgataaccactcgtccacgaaaagcgacgtcgtttaatgcctggcgcatcgcggtgaccgccaggccatcaattttatttttgtcgccacatccggtttgcggccaggcagccaacgctgcctgttccgtaacgcgaaataatggccacgccagggacatcattgcgcggcctccccgatatcaacgccaaattgtgccagcagatatttctcggcctgttcattccagatgccgtgcgtttcctcaaccagccgcgccaactctttaaacagcggatcggttttgcctttttcggcaaaatcggcaatggcagtgagcggcatggtcacgccgttataaatgagttttttaccgccagggatatccggcagattgagcacggtttctggcaccgcatccaggccaccgatatgggtcaccataaagctcggctgtaactgcccagtggcgctaagggcaatcgcctctttcatgtcgtccgtactaccgccagatgtaccgacgacgtgcgtgctgttgtaatggacgttgtagaaattaaacggcactttgaagtttttatccgtcggcccggcaaagaagttcagacagccatcttccgccagtaattcatcagccatctcaacgacagcaggcaccgccgcataaacaaaaatgtcatcgaacccggcatctcctgtcagcgcccgcagcatctggacaggatcgctcatccctttggtattcacatacaccagctcaatgcctttactggccgccagttccaccggcagcagcttctgtacctgcgccagacgtttgtcgtcgatatcgaccaccaccacccggctcggttgtatgccgccgttaatggcgtaatcgatagcgccaatgcccatcggacctgcacacgccagcagtgcaatattgccgccaggtttgacgcccatgcgatgctcataaacatattgcgtggtgtgataattggcatgataagcaccaataatgcagcacataggctctgccaggctcgccgcagcaaaataagagccgtgatacggtaatacgcagcccaaattaatggcgatttcgggaataatcatataagtggcattgccgccaaaatattcgtagctgtagcccgcactatatccgcttggtaaccccatcgccggttgcaatacaaaacgctggccttttttatatttgccagtgagatttttacccacttcgacaataaccccggcacattcatgcccggtaatgaccggatgattttctaaatcgtcgggtacgcgtttatgttcactaccgagtaacgccgctttccaggtgcttaaacagacgctgtcagaaattacactcaccagtaattcattatcggtaatttctggcagttcaaatacgcgcagacggacatcccgcttgccataaatagcagcaactttggttttcatttttacctctgtaatcagtgtttatgttcggcggttaattgattaaataaagtgtcgagttttggatcgccaatatagttattaatcaatatcagtggtttatccgtcacacgtttcacgcgcccttccagactggcatgagtaacgacgatatccgcatccgcaggcacgttttctatggcgtaatgttttacttcaattgccagccccgctttttccaggcgtttacggaaggtggtcgcgcccatcgcactggagcccatccccgcatcgcaaacaaaggcgatacgcttaaccctgcttaagctgaatgcaccctcttgtttcatcgccttaaccgcattggcactctgagcaaactcatcttcgctctccgtttccaccgttttttccatcttcagtatcaggctagtaatagcaaaggacaccagggtacctaccgtaacaccggcaattgtcgccaggaagctgcctttcggcgtcagtgccaggtaagcaaagatagaccccggacttgggccagccaccagaccaccgtccagtaagttaaacatccaggtgccagacataccgcccgcaatcatggcaataatggtcagcggcttcatcagcacatacgggaaatacagttcgtggatcccaccgaggaagtgaataatcatcgccccgggcgcagaacgtttactcatccctttaccaaacaaggtaaacgccagcagcagccccaggcccggacctgggttagaggccaccataaagaagatggatttaccgttaacgctagcctgttgcattcccagcggataatagacgccctgatcgatcgcattattgaggaaaagcactttcgccggttcattgatgacactcaacaatggcagataacccgcatgtaccagcgcctcaatacactctttgacgaaagtattggcaattaacaccgccgggccgataacttcaaaacccagcagacaaaggagcatccccgcgatacctaaactgaagttattgataaccatctcaaaaccggcaggtatgcgtttttccagtgccttatcgacatattttatgaccaacccaccgagcggccccatgatcatactgccaaggaacatcgggatctctgcgccaacgatcacaccaatagtacctattccgcccatgaccgccccgcgtttaccgccgaccagatgaccacctgtagaaccaatcatcacgggcaataaataggtaatcatcgggccgacaattttggcgaaatgttcgttaggcagccaaccggtgggaataaataacgcagtaataaaaccccaggcaataaaagcaccaatattggggatgaccattgcagtcaaaaagcccccaaaagcctggacctttgcacgagcagacttgttttccataatattatcctgtagaggagagagtaattatccgcggctgataatgtccgctaattgtttttcactacttgctgttaagagttgttcgagtatttcttcttcgcacagtaattcacttaacgcctgaatagcgccaatgtggctatcggcatcggcagcagagagtccgatgagtaatttaattggttcgtcattccccggaaaataaacaccttgttcaagtaatgtcaaagacatcccggttttaagcgccccacattccggtcgcgcatgaggcattgccacgcctggtgcgagaatataataagggccattgttaatggtggaatctttaattgcctgaatgtaattctcgctgatatagtttttatccagcaaacttaccatgctgaaatcgatagcttcctgccaatcttttgcactatgtataacactgatactactttctggaaaataatcactaagccgcataaattatccttattttatttttagggtaccgtccggcggtaaaaataaaatactcgtgcggtttaatgaaagcaattgagcagggaaaccggtgttttgaaaacagtgaattattaatttcttatataacattgagttatagatataacaacaaatgtcaatacgcatatcgtgatgcatattacataattgatatttattgcatataaatatttgtgatctacaacacgccttatctattgcttgtccgcaaacggacatatcaaggtaataaaaaaggtcgccgaagcgacctttttacccgaaatgctaattacagcagttcttttgctttcgcaacaacgttatcaacagtgaagccgaactcttcaaacagcagctctgccggagcagattcaccgaaggtggtcataccgacgatagcaccgttcaggccaacatacttgtaccagtagtcagcaatacccgcttctacagcaacgcgtgcagtaaccgctttcggcagtacggattcacggtaagcagcatcctgcttgtcaaatgcgtcggtagacggcatggacaccacgcgcgctttcacgccttcggcagtcagtttttcgtaggcagcaacagccagttcaacttcactaccggtagcgatgaaaatcagttccggctgaccggcgcagtctttcagcacataaccaccgcgcgcgatgtttgccagttgctcttcagttcgttcctgctgcgccaggttctgacgggagaggatcagtgcggtcgggccgtcctgacgctcaacaccgtatttccacgcgaccgcggattcaacctggtcacacggacgccatgtagacatgttcggggttacgcgcagagaagcgacctgctcaaccggctggtgagtcgggccgtcttcgcccagaccgatggagtcgtgggtgtaaaccatcacctgacgctgtctcatcagcgcagccatacgtacggcgttacgtgcgtattccacgaacatcaggaaggtggaggtgtacggcaggaagccaccgtgcagggagataccgttagcaatcgcggtcataccgaactcgcgaacaccgtagtggatgtagttacccgcagcatcttcgttgattgctttagaaccagaccacagggtcaggttagacggcgccaggtcagcagaaccgccgaggaattccggcaacagcggaccgaacgcttcgatagcattctgagacgctttacggctggcgattttcgccggattagcctgcagtttagcgatgaactctttcgctttagcgtcgaagtcagacggcatttcgcctttcatacggcgggtaaattcagcggcttcctgcggataagctttcgcgtaagcagcgaatttctcgttccatgcggattctttcgcctggcctgcttctttcgcatcccactgagcatagatttcagacgggatttcgaacggcgcatatttccagcccagttgttcgcgggtcagggcaatttcagcgtcgcccagcggcgcaccgtgggagtcgtgggtaccggctttgttcggggaaccgaaaccgatgatggttttgcacatcagcagggaaggtttgtcagtcactgcgcgcgcttcttctactgcgcgtttgatagatgccgcgtcatgaccgtcgatgtcgcgaataacgtgccagccgtaagcttcgaaacgcattgcggtgtcgtcggtgaaccagccttcaacgtgaccatcgatagaaataccgttgtcatcgtagaatgcaatcagtttacccagcttcagcgtacccgccagagagcaaacttcgtgggagatgccttccatcatgcagccgtcgcccatgaaggcgtaggtgtagtggtcgacaatgtcgtggcccggacggttaaactgcgccgccagcgttttttctgcaatcgccataccgactgcgttggcaataccctgacccagcggaccggtggtggtttccacaccagcggtgtaacccacttccgggtgacccggagttttagagtgcagctgacggaagtttttcagttcttccatcggcagatcgtaaccggtgaggtgcagcaggctgtagatcagcatggagccgtggccgttggacagcacgaagcggtcacggtcagcccaggacggattctgcgggttgtgtttcaggaaatcacgccacaggacttcggcaatgtcagccatacccataggggcacccgggtgaccggatttggctttctgtactgcgtccatgctcagcgcacgaatagcattggcaagctctttacgactggacattttgactccagatcggatgatgaagggcacgcccttaacgacttgacgacagcgcgttttgggctacgccggaaaatttgccaacaatttaccacaagccgcgcgtcatgtacatggaacatccttttgccgcttcagaaatctctggatcatgctcgcatgttgcgcaatctactcgcccgtccgctgcgcttttccttatactgagactgagcgtcgattcacctgcaaacggcgcatttttagaataatcctgaccttgtgcggaagagaaaacatgaaaattcgcgccttattggtagcaatgagcgtggcaacggtactgactggttgccagaatatggactccaacggactgctcagtagtggagcggaagcttttcaggcttacagtttgagtgatgcgcaggtgaaaaccctgagcgatcaggcatgtcaggagatggacagcaaggcgacgattgcgccagccaatagcgaatacgctaaacgtctgacaactattgccaatgcgctaggcaacaatatcaacggtcagccggtaaattacaaagtgtatatggcgaaggatgtgaacgcctttgcaatggctaacggctgtatccgcgtctatagcgggctgatggatatgatgacggataacgaagtcgaagcggtgatcggtcacgaaatggggcacgtggcgttaggccatgtgaaaaaaggaatgcaggtggcacttggtacaaatgccgtgcgagtagctgcggcctctgcgggcgggattgtcggaagtttatctcaaagtcaacttggtaatctgggcgagaaattagtcaatagccaattctcccagcgccaggaagcagaagccgatgattattcttacgatcttctgcgccaacgcggcatcagcccggcaggtcttgccaccagctttgaaaaactggcaaaactggaagaaggtcgccaaagcagtatgtttgacgaccatcctgcatccgccgaacgcgcccagcatattcgcgatcgcatgagcgcggatgggattaagtaaagcctggtggtgtcgaacgtaggtcagataaggcgttcacgccgcatctgacatgaatggcacatttgttaccttgtgcgcattgccggatgcgatgctggcgcatcttatccggcctacgggtgccgaacgtaggtcggataaggcgttcacgccgcatccgacattaatggcacgttttacccgtgcgcatcgcatctggtgcttactcgccctttttcgccgcctgaatatacagcatttccagcgccagcgttgccgctgccagagcagtgatttcgctctgatcgtatgccggagccacttccactacgtccatcccaacaatgttgagatctttcaggccgcgtaccagtttaatagcgcgatcggaggtcaggccgccaatcactggcgtaccggtgcctggtgcaaaagcaggatccaggcagtcgatatcaaaagtcaggtaaaccggcatatcacccacaatctgtttcacttgggcgataacgtcatccacgctgcgatcgttcacctggcaggcgtccagcacggtaaagccgttgtctttatcaaactcggtacgaataccaatctgcacggaatgattcgggtcgatcagaccttctttcggcgcggtatagaacatagtgccgtggtcaaattcacaaccgttcgcataggtatcggtgtgggcgtcaaagtgtaccagcgccattttgccgaaatgcttcgcatgagcacgcagcagcggcagcgtaacaaagtggtcaccaccgaaagagagcatacgcttaccggcagccagcagcttctcggcgtgcgcctgcagcttttcgctcatctcacgggcatcgccaaaggcatataccagatcgccgcagtccacgacgttcagacgctcacgcatgtcgaaattccacgggaagcggttgtgttcccaggccagattcgtgctaacctgacggatcgctgccggaccgtggcgaccacccgcacgaccagaagtggccatatcgaacggcacgccagtaatcacccagtctgcatcgctgtcatacggctggaagttcatcggcaggcgtaaaaaaccaaaggcattggaaaccagactgttatcgtattgatgacctaaggtgctcatggatggactcctattacaaagtcgatataaaaaaacccttccgcgtcgttaggcccgacgaggaagggttggatttgtcacaataaattgtggcggattatcaccgctaaattaagcggattcaagtaacacaggacttactcatcttcaagataagtataaccgtacaaacctgcctcgaactcttcaaggaactgttgttgcagttcagcatcaagatcggttttcttcacttgatcgcggaactgggttaacagcgttttcggatcgagctgtacatattgcagcatgtccgccacggtatcgccttcgtcagacagttctacttctacgctaccgtcagggaagacgaacacgtcaaccgcttcggtatcaccgaacaggttgtgcatgttgccgaggatctcctgatatgcgccgaccataaagaaaccgagcatcggcggattctctggatcgtactccggcattggcattgtcgtggcaataccgtcaccatcaatatagtggtcgatagcaccgtcagagtcacaggtaatatccagcagcacagcgcgacgttccggcacttgatccagcccttccagcggcagaaccgggaacaactggtcgatcccccatgcgtccggcatgctctggaacaggctgaagttgacgtacattttgtccgccatacgttcctgcagctcgtcgataatcggacgatgagcacggttttgcggatccagctgcttttgcacttcatggcacatgctcaaataaagctgctcagcccatgcacgttcttgcaggctaaagatgccggaagagtagccgatatgaatgtcgtgcagatccatctgactgtcgtgtaaccattcacgcagagaacggcgagttcccggttcgtgcatctcctgccaggtttcccacatgctttgcagcgcgcgcggcgcatcttctgcaggcgcggtcggcaccgtgtattcgttacgttccacgccgatgatattagacaccagcacggtgtgatgcgcagtcaccgcacgaccgctttcggtgattaccgtcggatgcggcagaccgttttcttcacacgcatcgccaatcgcccagataatgttgttggcgtattcattgaggccgtagttcacgctacagtcggactggctacgagtaccttcataatccacgcccagaccgccgccgacgtcgaagcactgaatattgacgcccagcttgtgcagttccacatagaaacgcgcggattcacgaacgcctgtcgcgatatcgcgaatattcgccatctggctaccgaggtggaagtgcagtagttgcaggctgtcgagacgcccggcttcacgcagggtttcaaccagttgcagtacctgagtcgcagccaggccgaacttgcttttttccccgccggaggactgccatttaccgctaccctggctagccagacgtgcacgcacgcccagacgaggaacgacattcagacgttctgcttcatccagcacaatggcgatttcactcatcttctcaatgaccagatagaccttgtgccccatcttctcgccaattaatgccaggcggatatattcgcggtctttataaccgttgcagacgatgacgctacgggtcatgccagcatgtgccagtactgccatcaactcggctttggaaccggcttccagacccagcggttcgccgctatgaatcagggactcaatcacgcggcggtgctggttaactttgatcggataaacaaggaagtaatcgccgttatagccgtaggattccctcgcacgtttgaacgcggcgttaatggaacgcaaacggtgctgcaggatctgtgggaaacagaacagtgcaggcagacgctggccctgtgcttcacgagttttcactaactgcgcgagatcgacgcgagcttccgggacgtccgggtccgggcacacgctaatgtggcccagctcgttaacgtcatagtagttattgccccaccaggcaatattgtaagtacgcagcatcttgctggcttcctgggagctcattgcaacctcctgcatggagcgtagtacaccgtgttcgcccgcactgctaggcaaacccatagacatgtcgtcagacatagcgaacctcaaattattttattaagtgtaaaacagttaacgactatcgcagcctggaactggcttaacaacccataagcacatggattttccagcagactatgctgacgctccaactgcgcaaccggtttctttttcataacattattaagcacataaccgaacgtaagtgtgaaagttcggcgaaaccacgagaaaactcttgtttttacaagagcgcccttgttcagtcctcagtaactgtaaccagctcttgaatcctgagaagcgccgagatgggtatagcaagcgcaggtatgcaaagcagagatgcagagtgcggggaacgaatcttcaccagaacggtgagacaggttaagcagcagacaacggttcattatttcgtaagtcctccacggccgcctgttaagacgaacccacaagccaaaactctgattagtacccggctggaagtggcaacacgaaagaaacgtcgtgtgctttttatttaagccgcgcgccgcgttttataccccacaatggcagaaaattgcaaaagataaatacgcagaatgccggcattgtcaggaaaaatttccagccacgtttttaacagaatgagacagctttcaaaaaaaagtggaaatagggtgaagaattgacctaaaatagccatccagatgttaatccatccataccgattaacactcagactgccagtgtttttaacctgcagagtcgtggtaggatccgctaccacagaaaatccacacaacagtttgagctaaccaaattctctttaggtgatattaaatatggcaaaacacctttttacgtccgagtccgtctctgaagggcatcctgacaaaattgctgaccaaatttctgatgccgttttagacgcgatcctcgaacaggatccgaaagcacgcgttgcttgcgaaacctacgtaaaaaccggcatggttttagttggcggcgaaatcaccaccagcgcctgggtagacatcgaagagatcacccgtaacaccgttcgcgaaattggctatgtgcattccgacatgggctttgacgctaactcctgtgcggttctgagcgctatcggcaaacagtctcctgacatcaaccagggcgttgaccgtgccgatccgctggaacagggcgcgggtgaccagggtctgatgtttggctacgcaactaatgaaaccgacgtgctgatgccagcacctatcacctatgcacaccgtctggtacagcgtcaggctgaagtgcgtaaaaacggcactctgccgtggctgcgcccggacgcgaaaagccaggtgacttttcagtatgacgacggcaaaatcgttggtatcgatgctgtcgtgctttccactcagcactctgaagagatcgaccagaaaagcctgcaagaagcggtaatggaagagatcatcaagccaattctgcccgctgaatggctgacttctgccaccaaattcttcatcaacccgaccggtcgtttcgttatcggtggcccaatgggtgactgcggtctgactggtcgtaaaattatcgttgatacctacggcggcatggcgcgtcacggtggcggtgcattctctggtaaagatccaagtaaagtggaccgttccgcagcctacgcagcacgttatgtcgcgaaaaacatcgttgctgctggcctggccgatcgttgtgaaattcaggtttcctacgcaatcggcgtggctgaaccgacctccatcatggtagaaactttcggtactgagaaagtgccttctgaacaactgaccctgctggtacgtgagttcttcgacctgcgcccatacggtctgattcagatgctggatctgctgcacccgatctacaaagaaaccgcagcatacggtcactttggtcgtgaacatttcccgtgggaaaaaaccgacaaagcgcagctgctgcgcgatgctgccggtctgaagtaatctttcttcacctgcgttcaaaggccagcctcgcgctggcctttttcttttggataggcgttcacgccgcatccggcaaaaaaaccgcccgcacaataacatcattcttcctgatcacgtttcaccgcagattatcatcacaactgaaaccgattacaccaaccacaacagacaaagatttgtaatattttcatattattattcggttttcacagttgttacatttcttttcagtaaagtcttaattgcagataacagcgtttaatctatgatgatataactcaattattttcatgcacttaaatcataactaagataaatgttagtgtaagcgattacactgatgtgatttgcttcacatctttttacgtcgtactcacctatcttaattcacaataaaaaataaccatattggagggcatcatgcctgacgctaaaaaacaggggcggagtaacaaggcaatgacgtttttcgtctgcttccttgccgctctggcgggattactctttggcctggatatcggtgtaattgctggcgcactgccgtttattgcagatgaattccagattactagccacacgcaagaatgggtcgtaagctccatgatgttcggtgcggcagtcggtgcggtgggcagcggctggctctcctttaaactcgggcgcaaaaagagcctgatgatcggcgcaattttgtttgttgccggtagcctgttctctgcggctgcgccaaacgttgaagtactgattctttcccgcgttctactggggctggcggtgggtgtggcctcttataccgcaccgctgtacctctctgaaattgcgccggaaaaaattcgtggcagtatgatcagcatgtatcagttgatgatcactatcgggatcctcggtgcttatctttctgataccgccttcagctacaccggtgcatggcgctggatgctgggtgtgattatcatcccggcaattttgctgctgattggtgtcttcttcctgccagacagcccacgttggtttgccgccaaacgccgttttgttgatgccgaacgcgtgctgctacgcctgcgtgacaccagcgcggaagcgaaacgcgaactggatgaaatccgtgaaagtttgcaggttaaacagagtggctgggcgctgtttaaagagaacagcaacttccgccgcgcggtgttccttggcgtactgttgcaggtaatgcagcaattcaccgggatgaacgtcatcatgtattacgcgccgaaaatcttcgaactggcgggttataccaacactaccgagcaaatgtgggggaccgtgattgtcggcctgaccaacgtacttgccacctttatcgcaatcggccttgttgaccgctggggacgtaaaccaacgctaacgctgggcttcctggtgatggctgctggcatgggcgtactcggtacaatgatgcatatcggtattcactctccgagcgcgcagtatttcgccatcgccatgctgctgatgtttattgtcggttttgccatgagtgccggtccgctgatttgggtactgtgctccgaaattcagccgctgaaaggccgcgattttggcatcacctgctccactgccaccaactggattgccaacatgatcgttggcgcaacgttcctgaccatgctcaacacgctgggtaacgccaacaccttctgggtgtatgcggctctgaacgtactgtttatcctgctgacattgtggctggtaccggaaaccaaacacgttagcctggaacatattgaacgtaatctgatgaaaggtcgtaaactgcgcgaaataggcgctcacgattaatctccccaagcttcctcccatcgcggaggaagccacctcttgcagtcatcttttcttcgctctatcctctgccgctatgaaaacatcccgtctccctatcgccatccaacaggccgttatgcgtcgcctgcgggaaaaactcgcccaggccaacctgaagctagggcgtaactacccggagccaaaactctcttacacccagcgcggaacctccgccggaacggcctggctggaaagctatgaaattcgcctcaatcccgttttgctgttggaaaacagtgaagcttttattgaagaagtggtaccgcacgaactggcacatttgctggtatggaaacatttcggccgcgtagcgccacatggcaaagagtggaagtggatgatggaaaacgtgctgggtgttcccgcccgtcgtacgcatcagttcgaactgcaatccgtgcgtcgcaacaccttcccctaccgctgcaagtgccaggagcatcagcttaccgtacgccgccataatcgcgtagttcgtggcgaggccgtctatcgctgtgttcactgcggtgaacagctggttgcgaaataaccatctgaactatcaggaactttcctgatttggctgattgcataccaaaacagctttcgctacgttgctggctcgttttaacacggagaagtgcctacactagcgggattctttttgttaacccctaccccacgcgtacaaccgcgtggggagacgacgcggatttttaactatgcgtatcccccgcatttatcatcctgaaccactgaccagccattctcacatcgcgctttgcgaagatgccgccaaccatatcgggcgcgtactgcgcatggggccggggcaggcgttgcaattgtttgacggtagcaaccaggtctttgacgccgaaattaccagcgccggcaaaaaaagcgtggaagtgaaggtgctggaaggccagatcgacgatcgcgaatctccgctgcatattcacctcggtcaggtgatgagccgtggtgaaaaaatggaatttactatccagaaaagcatcgaactcggtgtaagcctcattacgccacttttttctgagcgctgcggcgttaaactggatagtgaacgtctgaacaagaagcttcagcagtggcagaagattgcaattgctgcctgtgagcagtgtggtcgtaaccgggtgccggaaatccgtccagcgatggatctggaagcctggtgtgcagagcaggatgaaggactgaaactgaatcttcacccgcgcgccagtaacagcatcaatacgttgccgttaccggttgaacgcgtccgcctgctgattggcccggaaggcggtttaagcgcagatgaaattgccatgactgcccgctatcaatttactgatatcctgttgggacctcgcgttttgcgtacagagacaactgcgctcaccgccattaccgcgctacaagtacgatttggcgatttgggctaacggagaagaataatgatcaagctcggcatcgtgatggaccccatcgcaaacatcaacatcaagaaagattccagttttgctatgttgctggaagcacagcgtcgtggttacgaacttcactatatggagatgggcgatctgtatctgatcaatggtgaagcccgcgcccatacccgcacgctgaacgtgaagcagaactacgaagagtggtttagcttcgtcggtgaacaggatctgccgctggccgatctcgatgtgatcctgatgcgtaaagacccgccgtttgataccgagtttatctacgcgacctatattctggaacgtgccgaagagaaagggacgctgatcgttaacaagccgcagagcctgcgcgactgtaacgagaaactgtttaccgcctggttctctgacttaacgccagaaacgctggttacgcgcaataaagcgcagctaaaagcgttctgggagaaacacagcgacatcattcttaagccgctggacggtatgggcggcgcgagcattttccgcgtgaaagaaggcgatccaaacctcggcgtgattgccgaaaccctgactgagcatggcactcgctactgcatggcgcaaaattacctgccagccattaaagatggcgacaaacgcgtgctggtggtggatggcgagccggtaccgtactgcctggcgcgtattccgcaggggggcgaaacccgtggcaatctggctgccggtggtcgcggtgaacctcgtccgctgacggaaagtgactggaaaatcgcccgtcagatcgggccgacgctgaaagaaaaagggctgatttttgttggtctggatatcatcggcgaccgtctgactgaaattaacgtcaccagcccaacctgtattcgtgagattgaagcagagtttccggtgagcatcaccggaatgttaatggatgccatcgaagcacgtttacagcagcagtaacccaccttagcgagaaggatctcgttgagactctgagtgacagcgcccttctttccacgcatactgggcgctgttgcttttttgaaccaggaaacagaacctctgacaatgaatttacagcatcactttcttattgccatgcctgctctccaggatccgattttccgtcgttccgtggtctacatttgcgaacataataccaatggtgcaatggggatcatcgtcaacaagccgctggaaaatctcaaaattgaagggattctggaaaagctgaagatcacgccggagccgcgtgatgaaagtatccgtctggataaaccggttatgctcggcggtccgctggctgaagatcgcgggtttattttgcatactccgccctccaattttgcttccagcattcgcattagtgacaacacggtaatgaccacttcccgcgatgtgctggaaacgctcggcaccgataaacaaccgtctgacgtattggtggctctgggttatgcctcctgggagaaaggtcaactggaacaagaaattctcgataacgcgtggctaacggccccggcagatctgaatattctgttcaaaacgccgattgccgaccgctggcgcgaggcggcaaaactgattggtgtggatattctcaccatgcctggtgtggcaggacacgcctgatgagtggaaccttactcgccttcgacttcggcaccaaaagcattggcgtagcggtcggccaacgcattaccggcaccgctcgccctttgcctgcaattaaagcacaggacggtacgccggactggaacattatcgagcgtttactgaaagagtggcagccggacgaaatcatcgtcggtttgccgctgaatatggacggcaccgagcaaccattgactgccagagcgcgtaaatttgccaaccgtattcatggccgtttcggtgttgaagtaaagctccatgacgagcgtcttagcactgtggaagcccgttccggtctgtttgaacagggcggctatcgggcgctcaacaaaggcaaagttgactctgcctctgcggttattattctcgaaagctatttcgagcagggatattaaggcgatttaaacgcctggcggagtgtaaataatatcatcgcgtcttattgccggatgcggcgtgaacaccttatccagcacacatctggcagcggctataggtctgataagacgcgttagcgtcgcatcagacatttattgcctttgtaggcccgataagcttgcgcatcgggcatggcaacgtcacaaacgcccttcccccacccggtgctgataactctgctgaaacgttatcatccccacctgctgcccggtttgaataacatgcggtaactggtgggttttcccttcgcgaatcaaattccccaccgcgggtgtgttaatcagcaattcaaatagcgccacgcgtccttcctgtttatccacttccagcttttgactcagcactgcccgtaaactacctgccagttgattacgcacggggtctttttcctgcgccggaaaactatccaccagtcgctcaactgcctgcgcggcaccacgcgtatgtaatgttgccagcaccaaatgcccggtttctgccgccgtcagtgccagacggattgtctcgctgtcacgcagctctccgagcaaaatcacatcaggatcttcccgcaatgcggcccgcaatccgcttgcgaacgtcatacagtgcaaaccaatttcccgctgctggatcaaacatcgctggctggcatagagatattcaacaggatcttccagcgtcagaatatgcgcatcggcatgttgattgagatagccaaccatcgccgccagcgtggtagatttgccactccccgtcgcccccgtcaccagaatcaggccattctcgctcttgagtaattccggcaataccgttggtgcgccaagctgttcgagctgcgggcagtggctaggtaacagccgtaacgccaggctaatgccatgccgttgcgcgaatgcgctgccacgcaatcgctggttttccgccaggctcacggcaaaatccagctgaccattctccagcaatattgcccgctgatcgtcatccagccactcccgcagtagctcttcgacgtccggcgtatcaaacggcgcagcttccattctgccgcgaatgcgccatcgtgcgggccaggcgctgcacaggtgtagatcgctgacgttatgctttacactaagggccacaatttcttccatattcatactaagatcctcggaaaatgaacgatattgcgcataacctggcacaggtccgggacaaaatcagtgcggctgcaacgcgttgcggccgttctccagaagaaattacgctgcttgcagtcagtaaaacaaaacctgcgagcgccatcgcagaagccattgatgccgggcagcgtcaatttggtgaaaactacgttcaggaaggggtagataaaattcgccactttcaggaactgggcgtaacaggattagaatggcattttattggcccgttgcagtctaataaaagccgcctggtggcagagcatttcgactggtgtcataccatcgaccgtttgcgcatcgctacccgtctcaacgaccagcgcccggcagaacttccccctcttaacgttctgattcaaattaacattagtgatgaaaacagtaagtccgggattcaactggctgaactggacgagctggcagctgcggtcgctgaactaccgcgtttacgtctgcgcgggttgatggcaatccctgcgcctgagagtgaatatgtaaggcagtttgaagttgcacgccaaatggctgtagcatttgccggactgaaaacgcgctacccgcatatcgacacgctctctctgggaatgagcgacgatatggaagccgccattgcggcaggtagcacgatggttcgtatcggcactgcaatttttggtgcgcgtgattactctaaaaaataaggaattaaaggaacgccatgaatacgttgactttcctgcttagtacggtcattgagctgtataccatggtgctgttattacgcatctggatgcagtgggctcattgtgatttttacaaccccttcagtcagtttgtagtgaaggtaacgcagccaattatcgggccactgcgccgcgttattccggcaatggggccaattgacagcgccagcctgctggttgcctatattctcagttttatcaaagccatcgtgctgtttaaagtggtgaccttcctgccaatcatctggattgccggtttactgattctgctgaaaaccatcggcctgctgattttctgggtcctgctggtgatggcgattatgagctgggtaagccaggggcgtagcccgattgaatacgtgctgattcagctggccgatccgctgctgcgcccgattcgccgcctgctaccggcaatgggtgggattgatttcagcccgatgatcctcgttctgctgctgtatgtcatcaatatgggtgtcgcagaagtattacaggcaaccggaaatatgctgctgccagggctgtggatggcgttatgaatgccgtaacagttaatgatgacggtctggttttacggctctatattcagccgaaagccagccgtgattctattgtcggtttacatggcgacgaagttaaagtcgccattaccgcgccgccggttgacggccaggccaacagtcatctggtgaagtttctcggtaagcaattccgggttgccaaaagccaggtggtgattgaaaaaggcgaacttggccgccacaaacaaattaaaatcattaatccgcaacaaatcccgccagaaatcgcggcgttaattaattaagtatcctatgcaaaaagttgtcctcgcaaccggcaatgtcggtaaagtgcgtgagctggcgagcctgcttagcgacttcggtcttgatatcgtggcccaaacagacctcggcgttgattccgctgaagaaaccggcctgacctttatcgaaaacgcgattctgaaagcgcgccatgcggcaaaagtgaccgctttaccggcaattgccgacgactctggtctggcggtagatgtgcttggcggcgcgccgggcatttactccgcgcgttattccggtgaagacgcgaccgatcaaaagaatctgcaaaaactgctggaaacaatgaaagacgtaccggacgaccaacgtcaggcgcgtttccactgcgtgctggtatatctgcgtcacgcggaagatcccactccgctggtatgccacggtagctggccgggcgtgattactcgtgaaccagcgggcactggtggctttggttatgatccaatcttcttcgtaccttccgaagggaaaaccgccgccgaactgacccgcgaagaaaagagcgccatttcccaccgtggtcaggcgttgaaactgctgctggacgctttacgtaatggttaaattacctccgctgagtctctacattcacatcccgtggtgcgtgcagaaatgcccgtactgcgatttcaactctcacgcgttgaaaggagaagtgccgcacgacgattatgttcagcatctgcttaacgatctggacaacgatgtggcttacgctcagggccgtgaagtaaagacaatctttattggcggtggtacgccgagcctgctttccggcccggcgatgcaaacgctgctggacggcgtgcgtgcgcgtttgccgctggcagcggatgcagaaattactatggaagcgaaccctggcacggtagaagccgatcgctttgtcgattatcagcgtgctggtgtgaaccgcatctctattggtgtgcagagttttagcgaagaaaagctgaaacgacttgggcgtattcatggcccgcaagaagcgaaacgcgcggcgaagctggcgagcggtttagggttacgtagctttaaccttgatttgatgcatgggctgccggatcaaagtctggaagaggcgcttggcgatctacgccaggccattgaactgaatccgccgcatctttcctggtatcaactgaccatcgaacccaatacgctgtttggtagccgaccaccggtgctgccggacgatgacgcgttgtgggatatattcgaacaggggcatcagttattaaccgcagcgggttatcagcaatatgaaacttccgcttacgccaaacccggttatcagtgccagcacaatctcaactactggcgctttggtgactacatcggtattggctgcggcgcacacggcaaagtgaccttcccggatgggcgcattctgcgtaccaccaaaacgcgtcatccgcgtggttttatgcaaggaaggtatctggaaagccagcgtgatgtcgaagccacagataagccgtttgagttctttatgaatcgcttccgtctgctggaggccgcgccgcgcgtggagtttattgcgtataccgggctttgcgaagatgtgattcgcccacagttagacgaggcgattgcccagggttatctcaccgaatgtgcggattactggcagataacggaacatgggaagctgtttttaaatagcctgctggagctttttctggctgagtaaacttgtattgccggatgcggcgtgaacgccttatccagccgacatgtggcagcggttgtaggtctgataagacgcgcaagcgtcgcatcagacgttgattgccggatgcggggtcaacgccgcatcctgctacaaatcgtgcactatatcaaacttacttaatcaccccattgcgccgcagttgttcggtatcttttttccagcgttcattagcttggttgatatcgtcaattttcatcaaaatcgcgacttttttactgtttatttcactaactttcatcgttaacggatattgccctttttcgagcgttacccagtcatcctgcaatttacggctaagtttttgactttgcagaaaagtctgtcgccgttgttcgttgatatcgaaatctcgtttctgctgaatcggcacttcataacactcttcactctgtttatgacatgccgcaatcgccggttgataaacctctttgtcatatttaaccgcgaacgcctcgctatcgttctgtttattaaactcatcacgctgttggtgaatttttttaaaggcgtcttcgcgggtcatttgcttaccgtttgcatcttttccccaatatgcatccgctgctttctgcgccgccaccatttgcttatcaagcgctttcacttccttttccagcgcaggaatgctgttcttctgggtattcaacgcagattcaagctgactaaagcgataattgaaatcttcgctattcacgatcagatatttattattcgttttgatatcgtcgaccacccgcccacgatcgctggctgccgcctgaaaagagtaaaagttcacgctccagccagacgcgggcgttcctttactggttaacatcgcgctgaattttaccggtttatctttcgtccaggtctgttcgagcagttcgtaatctgccaactgaccgacccaggtatagagatcgtcactggaagagacatcgccttccgcactccaggtggcctgattacccttagcatcaagattttttaaggtgatagcatcaagcttgagaatgccgtgatactgctttttgaattgatcttttaagatattttcagttggcggttcgccatctgcccaggcattaccagtcatcaacataagcagtgccgtgccaacaatccattgctttttcacccgaaaaacctcacgcggaataatttattccggtgattatcattagggtaattaaaattggcaatggacgtgagtctgaagtgaaaaagccccggcacgataccggggcgaggcgattagtactgattgaagatctgctggatctgctgcggatctttggtttgcgtcagagccagttgcagcagaacgcgcgctttttgcgggttcagcgtgccagaggcgacgaagccgtatttcgcatcatccacttcggcatcctgagtggtagcgcccgtcggtacgcgggaagaacgcacgactgcagtaccggttttcgcggcggtcgccagcgtgtcgaacacagatttatacaggttgccgttacccacaccagcgctaacgatgccatcatagcccgcatctaccagtgctttagccggaagatcggatgcgttagcgtagttataaacaatgccgactttcggcagttcattcagcttagagacatcgaatggcgtgtcgctggtatgcttacgtgccggggtacgctggtagtcaatcttaccgttgtgaatgtaacccagaggaccgtagttaacagacttgaaggtcgctacgtcggtggtgttggttttggtgacgtcacggccatcaagcacggtgtcattcatcactaccagcacgccacggttggcggaggctttatcagctgcggtcactaccgcgttatacaggttgaatggaccgtctgcgctcatagacgtggacggacgcattgcgccgaccatcaccaccggtttgtcgcatttcaccgtcaggtcgaggaagtaagcagtttcttccatcgtgtcggtaccgtgggtaatgacgaagccgtcggtcttatcgcagtcggtgttaatttttttcgccagtgtcagccagacattatcgttcatgtcctgggagccgatattcactacctgctcgcctttaacgttcgcaatgtcttttagttgcggcaccgcattaaccagattttctacgccaactttacccactgtgtagttagatttggttgcggagtcaccaccaccggcaatggtcccgccggttgctaaaatggtgatattgggtaatgccaatgctgcaccactaaaacccataaccagtgcggcaagtgccgtctttttgaaaaactccatttcattcctccagttacgtgaacgctacgcattatcccttagctctgtatgggaaatttgacgttaaacaatttacaacgtgaatatattttggagatctacaaagttagaggcaggtaacaaaacgaagaattaaacggcataaaaaagtattatgccgtcttaaaatagaggattattttaaattcccgaccagggctttgcggctatcttccagagtcacaacgcggctacaaacatctttgccaaactgctggaaatctttttcctgctttttccactcggtttggatactggattgcagcccccccaggcttcccagcacattctgtaatgggttaccgccgctttttcagcaccgctttcgcgcccatttcattaatgctgtcctgtaaaattccacccattgcctgattcactaattgctggccttcggcgcgaacctgatcaatggctttatagtgaaacgtcaggccatcgctgcgcgtttcaataatgcggttcatctgctctttcagctgcgcatcaagtttggtcagacggctgcgcattttgctgctttcgcccatctcctgaacgataattttatccagagcaatacgggctttctcgacgcggcttttcgcgccttcatcaatccacggcagcgtgctgcgtagttcagcctgataatccttcgcctgctcgcgctgggcggcattcagggaatattgcttaccgttatacatcacgttgccgtctggcgtgatcaccagattgccgttttcgcccttcacctgcacggtttgcgggctgacaatcacatcgtcacgcggcgtgacgctgcactggtagtcggcgtgagcggtcattgccgtcacactaagtgctgccgccagcagcattttgcgcatcatagtcttccctcaagaaaaaatcaggccagcatttgctggccccagattgataacaaagtacgcgttttccatgccggatgcggcgtaaacaccttatcccgcctactcgatcgtgcatctttccaggcctgataagcgtagcgcatcaggcagttttgcatttgtcatcgcccgtatgctttcttagtcccaccaaacgtcgaaaagttcgctggtgcgtacctcatccagtttgcgctcttccagccacttacgcacaatcgcctgatgttcttcggtgcatttgccgatttcctgcatgcagatcagaccttcccaggccagataaccgctgccgtcaaaggccagtttgttcggttcgataacctcgttaataaaatcatcaacggttttatcaatctgttcttcgcttgtaccttccgggaatcgccatgccacgctaaatcctaattcctggaattcgtcgatgtgcatttttttacgcagacgacggctacggttctttgccattatttcaccctctcgaacattaagtcccatactccgtgaccaagacgatgaccacgttgttcaaatttcgtcaccggacgacttgccggacgcggtacgtaatcattgctctcactcaggtttttataaccgtcaatagaagacatcacttcaagcatatgttccgcataaggttcccagtcggtcgccatatggaatacgccccccagctgcagtttgctttttaccagttcggcaaacggcacctgaacgatacggcgtttattatggcgcgctttgtgccacgggtcagggaaaaagagctgcaccatgcgcaaactattgtcaggaatcattttatgcagcacttcaaccgcatcgtgacacatcacgcgcaggttgcttaaaccttcttcatgcgcagaagccaggcacgcaccaacgcccggactatgcacttcaatgccgaggaagtcctgctcagggcgatctttagccattgccaccaggctcgcccccatgccaaaaccaatctcaagcgtcaccggcgcttcacggccaaaaagcgcggggaaatccagcatatcttcgctgaactcaacgcccatcaccggccagtagttttccagcgcatgttcctggcctttggtcagtcgcccctggcggcgcacaaaactacggatacggcgcagtgggcggccgttttcatcaaattccggactaatgacgtcgtttttcataaaggtttagtcgcttgtgaaagtgttctgaaaacgggcattatccaaagttagttgccggatgcaagcatgataaggccgtggctgcggaaagttccggtttacaccctgccgtcgctgtgctgcaatcttgcccccaacaacagtgaattcggtgaccatgcaagcgagccaatttagtgcccaggttctggactggtacgataaatacgggcgaaaaactctgccctggcaaattgacaagacgccctacaaagtatggctcagtgaagtgatgttgcaacaaactcaggttgcgaccgttatcccctattttgaacgctttatggcgcgcttcccgacggtgaccgatctcgccaatgcgccgctcgacgaagttctccacttgtggaccgggcttggctattacgcccgcgcgcgcaatctgcataaagcggcacaacaagtggcgaccttacacggcggtaaattcccggaaacctttgaggaagttgcagcactgccgggcgtcgggcgttccaccgcaggcgcgattctcagcctttctctgggtaagcactttccgattctcgacggtaacgtcaaacgcgtgctggcgcgctgctatgctgtaagcggctggcctgggaaaaaagaggtcgagaataaattatggagtttgagcgagcaggtgacgcccgcggttggcgtggaacggtttaatcaggcgatgatggatttgggtgcgatgatttgtacgcgcagcaaaccgaaatgtagcctctgtccgctacaaaacggatgtattgccgccgccaacaatagctgggcgctttatccgggcaaaaaaccgaaacagacgctgccggagcgcaccggctactttttgctattacagcacgaagatgaagtattgctggcgcagcgtccgccgagcggattgtggggcggtttatactgtttcccgcagtttgccgacgaagaaagtttgcggcagtggctggcgcaacggcagattgctgccgataacctgacgcaactgaccgcgtttcggcataccttcagccatttccacttagatattgtgcctatgtggcttcccgtgagcagtttcaccggctgcatggatgaaggcaatgcgctctggtataacttagcgcaaccgccgagtgttggcctagcggctcccgtggagcgtttgttacagcagttacgcactggcgcgccggtttaacgcgtgagtcgataaagaggatgatttatgagcagaacgattttttgtactttcctgcaacgtgaagcagaaggtcaggattttcagctgtaccccggcgagctgggaaaacgcatctataacgagatctccaaagaagcctgggcgcagtggcagcacaagcaaaccatgctgattaatgaaaagaaactcaacatgatgaatgccgagcaccgcaagctgcttgagcaggagatggtcaacttcctgttcgagggtaaagaggtgcatatcgagggctatacgccggaagataaaaaataaaaacagtgccggagcacgcctccggcaacttgcataaaaacaaacacaacacgcacccggaatgatgaaaaaatatctcgcgctggctttgattgcgccgttgctcatctcctgtagcacgaccaaaaaaggcgatacctataacgaagcctgggtcaaagataccaacggttttgatattctgatggggcaatttgcccacaatattgagaacatctggggcttcaaagaggtggtgatcgctggtcctaaggactacgtgaaatacaccgatcaatatcagacccgcagccacatcaacttcgatgacggtacgattactatcgaaaccatcgccgggacagaacctgccgcgcatttgcgccgggcaattatcaaaacgttattgatgggtgacgatccgagtagcgtcgatctctattccgacgttgatgatattacgattagcaaagaacctttcctttacggtcaggtggtggacaacaccgggcagccgattcgctgggaaggtcgcgcaagcaacttcgcggattatctgctgaaaaaccgtctgaagagccgcagcaacgggctgcgtatcatctacagcgtcaccattaacatggtgccgaaccaccttgataaacgtgcgcacaaatatctcggcatggtccgccaggcgagtcggaaatatggcgttgatgagagcctgattctggcaattatgcagaccgaatcttcctttaacccgtatgcggtcagccgttccgatgcgctgggattaatgcaggtggtacaacatactgccgggaaagatgtgttccgcagccaggggaaatccggcacgccgagccgcagtttcttgtttgatcctgccagcaatattgataccggcaccgcgtatctggcgatgctgaacaatgtttatctcggcggaattgataacccaacaagccggcgttatgccgtcatcaccgcctataacggcggcgcaggcagcgtgctgcgagtctttagcaatgataagattcaggctgccaatattattaacaccatgacgccgggcgatgtttatcagacgctgacgacccgccatccctctgcggaatctcgccgttatctttataaagtgaataccgcgcaaaaatcctaccgccgccgataattccattaaccgcccctgacgatgctcaggggcaaaaatgttatccacatcacaatttcgttttgcaaattgggaatgtttgcaattatttgccacaggtaacaaaaaaccagtccgcgaagttgatagaatcccatcatctcgcacggtcaaatgtgctttttcaaacactcatccgcatcacgatgtgaggaaattaacatgaatcttaagctgcagctgaaaatcctctcttttctgcagttctgtctgtggggaagttggctgacgaccctcggctcctatatgtttgttaccctgaagtttgacggtgcttctattggcgcagtttatagcagtctgggtatcgcagcggtctttatgcctgcgctgctggggattgtggccgacaaatggttaagtgcgaaatgggtatatgccatttgccacaccattggcgctatcacgctgttcatggcggcacaggtcacgacaccggaagcgatgttccttgtgatattgattaacagctttgcttatatgccaacgcttgggttaatcaacaccatctcttactatcgcctgcaaaatgccgggatggatatcgttactgacttcccgccaatccgtatctggggcaccatcggctttatcatggcaatgtgggtggtgagcctgtctggcttcgaattaagccacatgcagctgtatattggcgcagcactttccgccattctggttctgtttaccctgactctgccgcatattccggttgctaaacagcaagcgaatcagagctggacaaccctgctgggcctcgatgcattcgcgctgtttaaaaacaagcgtatggcaatcttctttatcttcagtatgctgctgggcgcggaactgcagattaccaacatgttcggtaataccttcctgcacagcttcgacaaagatccgatgtttgccagcagctttattgtgcagcatgcgagtatcatcatgagcattagccagatctctgaaaccctgttcattctgaccatcccgttcttcttaagccgctacggtattaagaacgtaatgatgatcagtattgtggcgtggatcctgcgttttgcgctgtttgcttacggcgacccgactccgttcggtactgtactgctggtactgagcatgatcgtttacggttgcgcattcgacttcttcaacatctctggtagcgtgtttgtcgaaaaagaagttagcccggcaattcgcgccagtgcacaagggatgttcctgatgatgactaacggcttcggctgtatcctcggcggcatcgtgagcggtaaagttgttgagatgtacacccaaaacggcattaccgactggcagaccgtatggttgattttcgctggttactccgtggttctggccttcgcgttcatggcgatgttcaaatataaacacgttcgtgtcccgacaggcacacagacggttagccactaattacgcaaagaaaaacgggtcgccagaaggtgacccgttttttttattcttacttcaacacataaccgtacaaccgtttcacgccatccgcatcggtttcgctataaacaccttgcagctccgggctaaatcccggcaacaaattcaccccttcttccagtgcaaggaaataacgttgaaccgccccaccccagacttccccgggtaccacgcaaagcacgccaggtggataaggcaacgccccttctgccgcaattcgcccttcggcatcacgaatccgcaccaactccacgtcaccgcgaatataagcgctatgcgcatcctgggggttcatcaccacactcgggaaactctgctggcggaacatcgctttttgtaggtctttgacgtcgaaactgacatacagatcgtgcatctcctgacacaactggcgcagggtgtagtcgcgatagcgcaccggatacttgttataaacgctcggcaacacctcaaccagcgggctgtcatcctcaatatgctgttcaaattgcgccagcatcgccaccagttgtgccagcttctcgtggctttccgccggagttaataaaaacagaatggagttgagatcgcacttctccggcacaatgccgttctcacgcagatagtgcgccagaatcgtcgccggaacgccaaagtcgctatattcgccggtttcggcatcgatacctggtgtagtgagtaacagcttgcacggatcaacaaaatactgatccgcggcatatccttcaaagccgtgccacttcgcccccggctcaaaactgaaaaaacggcggtcgctggctaacacacttgtcggataatcctgccacaatttgccatcaacaacgggcgggataaacgggcggaacagcttacagcgcgcaagaatagccttgcgcgcttcaatccctatctcaacacactcagcccacagccgacgcccactctccccttcatgaattttggcgttaacatccagtgcagcaaacagcggatagaaagggctggtagaagcatggagcataaaggcgttattcaaccgcttatgcgggcaaaaacgcgcctgtccgcggatatggttatcttttttatggatctggctcgtctgactgaatcccgcctgctgtttgtgcacgctctgagtcacaaagatccccggatcgttttcgttaagttctaacagcagcgggctgctatccgccatcatcgggataaattgttcataaccgacccacgcggaatcaaacagaatgtaatcacacagatgcccaacggtatcgatcacctgacgggcgttatagacagtgccgtcataggttcccagctgaataatcgccaggcgatacgggcgcggcaggtcggctttttctggcgcaacgtcgcgaatttgctggcgcagatactcttcattaaaacagtgcgcatcaataccgccaatgaaaccaaacgggttgcgactagcttccagatagaccggcgtcgcccccgcctgaatcagcgcgccgtgatgattgctcttatggttgttacggtcgaagagcaccagatcgccacgcgttaacagcgcattcgtcaccactttattcgctgcgcttgtgccgttcagcacaaaataggttttatcggcatgaaagactttggctgcgaatttctgcgcatctttcgcgcttccttcatgaataagcagatcgcccaattttacgtcagcgttacacatatcggcgcgaaagacgttctcaccaaagaaatcgtaaaaatggcgtccggcaggatgctttttaaaaaacgcaccatgttgatgtccagggcaagcaaaggtgctgttgcccatctcaacgtactgcgtcagcgtgtcataaaacggtggcagcaaattctcttcatactgacaggctgcggattccagctccagccactgctgctcgttgccgttgattaccgccgtaacgcccgcaggtaattcaacagcatgttcggaatacaaaaacaccggtagatgaaaaccggtgcgcttaagcaacgcaagaatgccactgcgactatccgcagcggtaatgacgactgccgcgacgtccgtaaaatcagtatctcccaacgccaccacgcgacgatgagaagaaagtcgggataccagttcactactggcggcaatattcatacttttcataagcgcaaacccgtttcggggaagtaagaataccggacaaggtggaaaaccctgccccatgagatatgggtcaaactggtcaccagctccgaccgccagacatcagtaaaagcagaaacgctctgattttactgttgtcctgcagtgagcgtgcgttaacttcaccgcatgagcagtaacatagaaagggaaacgtttcgcgcgaaacggcgataagcgagagaatgtaaggagatggcgtgcatcgggcaaactccgtacagagaggagaaaattcgcgcaatcatggcacctttcgctaaagcgtgcaagccaggactttgcgaacaaacaagccatcgacggcaccaaacggtcataataagaaaatcaaacaatacagctaacaggaactcttgtggtcatcggcccttttatcaacgctagtgcagtcttactgggtggcgttctcggcgcactgctcagccaacgcttaccggaacgtatccgcgtctccatgacaagtatttttggtctggcaagcctggggattggtattttactggtggtgaaatgtgccaaccttccagcgatggttttagctacgctacttggcgctctaattggcgaaatttgtttgctggagaaaggtgtcaatacagcagtcgccaaagcacaaaatctgtttcgtcacagtcgtaagaagccagcgcatgaatcttttattcagaattatgtcgcgattattgtcctgttttgcgccagcggcaccgggatcttcggggcgatgaacgaagggatgaccggcgatccgagtattttaatcgccaagagttttcttgatttctttacggcgatgatcttcgcctgcagcctgggtattgcggtaagcgtgattagtatcccattactgatcatccagttaacgctggcgtgggctgccgcgctgattttaccgctgaccacaccgagcatgatggcagacttcagcgccgtaggcggtttattgctgctggcaaccggattacgcatctgtggcattaaaatgttcccggtggtcaacatgcttccagcactccttctggcaatgccgctttccgccgcctggaccgcctggtttgcctgacaatgcgtgcaatatcggcaaagtgatgatagattgtgcagtctgcagtaaattgaagaaatttgattgacgagacgaggcgaatcaggtttaatgcgccccgttgcccggatagctcagtcggtagagcaggggattgaaaatccccgtgtccttggttcgattccgagtccgggcaccactaattcttaagaacccgcccacaaggcgggtttttgcttttggatctgacaataaccttcacgaaaaaaattagcttataaagtctgggggaattactctcgccacgttaacgagagtaattttattgatattaatctcctgatactttacccccgtccaaactccagccgctgcacattcaccatcccaggcttctcagcagcactgacatcaatttgtgtcacccgcagcgcatagaacgccattttgaatttacgaacggacgcattatcagtgactttaacggcatgggcaaagtgaaatatcattttttaacgataaaaagagtgttatttcttgtgtatcagacaataagcattcattcaaaacctttagaaataatcaaaacacaggtattccactggttaatatattcacatatgaaatgaataaatattggaatatataaatattgaatattttgattaatccccgtactgattattcttcataatcagtacggggttgctacaacatgtattactttttcaccacaattaacggttcaatatcactctcttttttgatgaccagactttcatcaccgcgcaaacacgtcccaccgtagttgccgccaacggtgaaggtacatacctgaatgtatttaccgtccactttcggcaaacaccacagttgctgatagatgtttttctgctcggcaaatttaccgctggttttgtccagcacctcttcatgatggctgacgaggtcgatattgctgccacagcgaccggcgatcggtttcactgcgtaacctgttttcaccagttcatcattaacagtgaaatcggtatccagcaggtaacgatggtgcgggaacaggctccagaggatcggcagaatcgctttgttgccggggatcaccgtccacagcggctcaaagaccagcacttccgggcgcagcaatacgtcgataagacgcacttcgttttgcggatgaccggtacggattggcaccgcagcaaactcacggtcgctaacttcacgaatctgatcaaacgcggtttcccacgcccaggttttccacacgcagttaaccagtcgcccttccccatcaatcagttgcccggcagcatcccagcccagttcatccaatccacgcaagatacgcgtttcaaagcccgcctggtgcagcgcctgctccataaactgcgcgtgatagttttcctcgatatctttgtcctgcatgatatggacaaacggacgtgcacgactgtgtttccaggcaccagccaattcgttaatcagcccttccgccggattgaagccgttgcctttatagccctgctccgcccaacgttcgaggatcaagcccgcttcggtatgacaggaggcggagtcggcgttgtactcgtaaaccttcaggccacgctcatccatgcagaaatccatacgaccagtgatcatatggtgacggcgacgctgccaggagagacgcaaacgtggccagaggattttcgggatgtcgaacagcgccagcaggttgtcatctttcagcaccttgtcggttgcgtgaagatacatcaggtgcagctcgttggtggctttaattagctcctgctcggcactctcggtaatggtgtagtaatgataaggatcctgattgatcacctgaccgttggcctgcacataggcgttttgcagcggatctttttcatccagccatttaccgtcaaactggcctttgttttccaggcgcgctccgctgattttcagcagctcgcctgcaatttccggctgcggtaagctgtattcagtatcttccgtctggatcatccagcccagaatggtggtgtcatcaaaagtgtctttcagggtatagcagccgttttcgaccaccatctccagctcgcgcgtccactgttgcccttgcggcaacggggaatgaatcacgttctgttccgcaatacggactttgttgccatgcaattgggtaatgatggcgacatggccagtgtctttaaattcaccgcctttatcccagataagaagcgcacccgcgaccggcgcacgcgggctgccgttaggaaatgcctgcaatggcaggatgttgtcattaaccacttctcgcaggaagcgcaggctgaaaatctcccacgccatacccacgtcagtaaagaccacaccgtaattcagaaagagaaaacggcgagcaaattcaacgcattgccacttgtggcccatatattcgtcgtcgatatagctacggaatacggcgtcatcttcgtattcctgcggatcgagagaactgtaatcactagagtagattgctaccccacctggggcgtagcccaataatgtcccgaacggggcatcctggctggtcgttcctttgctcatcactttacctttaacaatacaacctaagcagttggcgtaattgttgtgctctgattacctgctcagcgacattaaccggacagaggtcagactaatcatacacctcatcgcagcggctggcgcaaagggttaaaaaattcacattctgtacagcaagtgacctgctacactgcttcaacactaccactcagaaggcaactcactatgacagacaatacttatcagcccgcgaaagtctggacgtgggataaatccgctggcggcgcgttcgccaatatcaatcgcccggtttctggtccgacgcatgaaaaaacgctgcccgttggcaaacacccattgcaactttatagcctgggaacgccgaacggtcagaaagtaacgattatgcttgaggagctgctggcgctgggcgttactggtgcagagtacgacgcctggctgattcgtattggcgatggcgatcaattctccagcggctttgtcgaagtgaacccaaacagcaagatcccggcgctgcgcgatcatacgcataatccgccgatccgcgtgtttgaatctggtagcatcctgctttatctggcggagaaatttggctacttcctgccgcaggatttggcaaagcgtactgaaacgatgaactggctgttctggttacagggcgcggcaccgttcctcggcggtggttttggtcacttttaccattacgcaccggtaaagattgagtacgccatcaaccgctttaccatggaagccaaacgtctgctcgacgtgctggataagcaactggcgcagcataagtttgttgcgggcgatgagtacaccattgcggatatggcgatttggccgtggtttggcaacgtggtgttaggtggtgtgtatgatgccgctgagtttcttgatgcgggcagttataagcatgtacaacgctgggcgaaagaagtaggcgaacgtccggcggtgaaacgtgggcgtattgttaaccgcaccaacggaccgctgaatgagcagttgcatgagcgccatgacgccagtgatttcgagacgaatacggaagataagcgtcaggggtaagggttggtgttcgtcgcagcaagccatccaggccggataaggcgttcacgccgcatccggcaatcgtgcacaatgcctgatgcgacgctgccgcgtcttatcaggcctacgaaagctaatcatcacgcgctggtaatgtcgtaatccatttggcgcagtgcgtctaatgtggctttggcttcatcttcgtcgatgatgctcatggcaaatccgacgtgtaccagcacccactggcccagtagatcggcagggttaccttcacaaatcagggcgatattcacatcgcgcttgataccacatacttcaacctgcgcaagctggtgaatatcttcaccgacagccagcacctggcctggaacgccaatacacattattaactccggttattcaacttcaatacttttgacgatcaggctatcgccggtatcgacacgcaaccgctcgccgtgacagagcggacactgcgcatcgtgctgatgaatctccaccacctggctgcaatcccagcaccaagcctgggcgggtttatagacgatatgtaaatcgcacccttgcgccaccgttccgtggcagacaatttcaaaactaaaacggacggcgctctcctcaacgcaggagagcgcgccaatttccagccacacggcggtgacgcgcttaacatcgtgctgctccgcctgccgttggataatttcaacggcgctctggcaaagagacaactcatgcattttcgccactcctgcgaccaaacagcagggcgcgacgccctgcgtgtggtacatccggattcgtgactggcaggctaaggatcattcgtgcgcagtcatccgtcaggcgttggccctcttcaatgctcatgctgtggctaagcgggctcatcaggctacaggagagatattggctaacaccgtccagttcgccaacggtaaaggtcatagtgccatacggcagttgcagaccaattttttcactcactttgcgcagcggccagagttgatccgggccggggaagataactgcactcagcatccacggggtgatcacacaccccgtccactgaccttcgaacagcgtaaaatcagaaacatacaccggcatactaggatgcagaaaagagagatcgtgcatgctacgccgggcaatttcttcaaacactgcctgtacttgcgccttcggggaggtctggaaacctgctatctcttcagtcatgaatcgcctcccgtgggatggcttccacgccagattcacgcagcgcagccagaacctgctcaagcgcaggttcaatcattgcttcaaccgtcggcgttaagccgatgtgtggctccaggctttccgggatcacgccgaccagggtcagctttttcggaaactcgccggtgaagcgcagggcgctcaagacgtcggccaggccaagctgatgcggagagattttgttggtaaacaacgccggaacttcttcatcccgcaggatcatcatcgttcccggcgcgttctttttgctgacaatggcatccgcaataatcaaatgatcgcgatttgccatgtcgccaagcagctccattcccgccgtgccgccatcgaggatctcaacataatccggcagaatgtatcgttgctctaacgcttcgacaatccgcacaccgatggcttcatcggtcagcaaaatattgccgacccctaagactaaaatacgcattacagaaccttcacactaaccacttcgttgccgtcagcatccactacgtgtaccgcacaggccatgcacgggtcaaaggagtgaatggtacgcaccacttccagcggtttattcggatcggcaaccggtgtacccaccaggctctgctcgtaaggaccgacgtcatcattgaagttacgcggaccagagttccaggtacttggaacaaccgcctggtagttgctgatgataccgtctttaataaccatccagtgagagagcataccgcgcggcgcttcgaggaagccaacacctttgaattcacccgttgccggaatgttcggcttcacaaaggtggtgtgatcgcctttgccgatattggtgatcagtgcactgtattggttttgcaggatatcctgcaattcacagcagtgaacggtacgaccaataatacggcccagcgtggagtgcagctgtgccacttccagcgtgttgccagtcagtttctgataaatcgcaacgatttcattcagtttgttctgggtagattcgcgacctgccgccagtttcaccagcatattagccagtggccccacttctaccgttttgccgtagaaagtcggacttttcacccaggaatatttcccgtcgtcagaccaaccatcataagccggaatggtggtgccttcccacggtgcctgcggcgcttcgtctttataccaggagtgcttcgcgctttcctgaatgcctttgatcaggtattcatcggaatgagaagtgatcggacgatagctggacagatccgcattctcaatgtagccgcccgggaacaggaagctgccgtttttactgtcggtcgggaattccggcacgctcaggtagttcaccgcacctttaccgcgtgtcagccattccgggtagaacgcggcaataactgcggtatcaaccttataaacctgctcaacaaagtcgctcagtttgtcgatgaaagacttgatgtacatcaggcgctcaaggttcagcacgcccaaaccgtcgaggttgatcgggttcgcgacaccacctaccgccaggttctgaatgtgcggcgttttaccgcccagcagcgccacgacgcggttagcgtcacgctggcactccaacgcttgcaggtagtgcgctaccgcaatcaggttcacttccggcggcagtttcatcgccggatgaccccagtagccattagcgaaaatacccaactgaccgctggcaaccagatctttgatcttgttctgaactttggtgaactcttccggactgttcaggtgccaggtgctaacgcctttcagcatttcggaggctttggttgggtcagcttgcagtgcagaagtgatgtccacccagtccagcgcgctaagctgatagaaatgaacaatatggtcatgcgtggtgtgcgcagccagaatgatgttacggatgtattgcgcgttaaccggaacgtcgatattcagcgcactttctgccgcacgaacggaagacagcgcgtgagtggtagtacatacgccacagatacgttgcacaatcatccatgcatcgcgcggatcgcggtttttcacgatctcttccatgccgcgccacatggtaccggaagcccatgctttgctaacgacgccattttcgatttcgcaatcgatgcgtaaatgcccctcaatacgggttaccggatcaatagtaattctctggctcatgctttgctcgcctcatgacgattatgatcgttttgttttaaaggaggaagtatcggcagtagacgaatgagtacgatgtaagcgcaaatctcaatagccacaaaaccaatagaaatcaacagttcttcccaggtcgggaagtaggcgtaaccgccgcccgggttgaatgccaccaggctataggtcagacgccaggttgcacaacctaacagtgcgctcagtgcactcaggaacagcatgcgggaatcattacgcagcttcgccacacgcagaacgaccagcgggaagagcatcagcaggacttcaatccagaacatcacggagtagaagtcaccggcaaacgctaagctcagcttgtcgcgatagataagctcgccaaagcgcagcacgatgaaaatcgccagcaacacactgatggtgttggtcagcttaacaaacagactcttttcatccggaccgttgccacgcagacccgcctgcaccaggctaccttcaaagatgacaatgctgaagcccatgatgaacgccgtcagcaggctgaacagcggcaacatttcatagctctgccacaacggatgcaccttgtagcccgcgctgatcatcaggctccccatactagactggtgcatggtcggcagcagcgcaccgagcgcgatgatgaagaacatcaccttgtttagtcgctgtaggctcaccttccaccccagacgttcaaacagtgccggagcaaactccagtgccatcacgccgatatagatggtcatacagaccgccgtctcgaacagtacgctgttcacgttgaagtgacccggaatgtagaagtacggcaggttccagtagcgacccacgtcgatagtgatgctcaagccacccagactgtaaccaaacagactcgccaacagcgccggacgcaccagcggatggtattgcccacggttaaagacgtataccgcccacgccagcgcccagccgccacaggcaaagccggtgccaatcagcaggtcaaacgcgatccacacgccccacgggaagccgccgttcaggtcagagacagagcccagaccgaacaccagacgcttcacaatcaggagcatacagatgacgattaacggtccaaaaatcatgaccggtttactgatgattttgccgcccagcggttgtggatcatgactcatgatcgtctcctccgtcgtgattattcaactctcatgatcgtctcctccgtcgtgatggtcgtttttggtgttgcgacgaaccagcacggttaagcccgccagcacagccagtggtagcatcatgcctttatacagggtgtgttgaatattttcggaacgcgcaccggtagaaagatcgtccagtttcggcaggtcgagattttcataaggcacacccgtcagtaccagaacctgagtaccgccgccctctttctcgccgtacagatgcggataatatttcggcaccgtatgcaggtaagtgtcgccagatttcagcgtctgacgcggatagtggtattcgctgccaggcttcagcgccagacgttttttcgcctccgccatcagctcttcacgcgtaccgaaaatcaccgcgcccgccgggcacacttctacgcagccaggtagaccgcctttatcgagacgttccacacctttctggttgcacagctcgcacttatgcagcgcaccaaacgggttgttgtagtcgtacttcggcacgttgtacggacaggcgaccatgcagtaacggcagccggtgcacacatctttgtcgtaatggacaatgccggttttcggatcttttttcagtgcagagaccgggcacacagagacacagttcggatcgacgcagtgcatacactgtttcttaatgtacgcgtagccgttctcctcctggtctttgttgacccctgtgccgctggtccacacctgaatgatgttattggtatacgggctcagtttgtcgttgttgctccaggtctgttccccttgcgggttacgttcagggaaattgatatcctgacacttggtgacgcaagcctggcagcctacgcacaaggtgctgtcgtacaacatccccaggcttcccggaattggcgggcggttttcagcagccgcatgactgacagacggcagcgcgcccgtcagcaatgccccgcaggaggctgctttaataaaattacgtctgttcacggttattctccccgactgtcagcgttatctttcttttgctgacgacccagttcacgcaccgccatcacgctgacaccggcaaccaacccaaccacaccgccgagcaaaccaatagcgcctgcagagacgttgccgccctctttagcgttaacatccggtttctgactacgcggagtttgattttcgacgttggcaagctgatggatgcctttatggaagccgataccttcttcgttacagccatagcaagggtgaccaatcgccaccggccacacaccgccaacatcgcagaattgcagcgtactgcagttgccgtaagtttctggccctttacagccgaggtggtacaggcaccagccttcgcggtggccttcatcaccgaactctttggcaaaacgaccagcatcgaagtgcgggcgacgttcgcagtgttcgtgaatcagacggccataggcgaaggtcggacggtttttgtcatccagtttcggcggtttgccgtaagtgatgatgtgcgcaacggtcgcgaggaagttgtgcgggttcggcgggcagcccggaatattgataacggttttgcctggcagaacttcttgcaggctgactgcgccagttgggttaactccagctgcggcaacaccgccccacgcagagcaggaaccgatagcgataatggctgctgcgccttccgccgctttgcggatgtgatccacaatcggctcaccggcaaccatgcaataaataccgttatcttttaatgggatggaaccatccaccactaacacatactgccctttgtacttctcgagagcgttatgtttgttctcttcgacctgatgaccgaaggcggcggaaagcacttcgtgatactccagagagatagtctccagtacgaggttttctaccgttggatgcgttgcacgaagcagagattccgtacaaccggtgcactcctgcgcgccaatccagataactggcggacgctgcgggttagtaacgctttcggccatctctgcagcggctttgctacttaaccccatggtggcggctaatgctgcacaaagcttcatgaaatcacgacggttaatgccgtgagaatggatgagggtgttatctccagtcatttatagttattccgttgcgaagacctggcatatattttgcctcaatcgcaaaatcaataatgcgatcgatgcgccatttaccacacatttattatggttatcgatatcatgatactgcggcggggcgctaaaacgaagggaagaagcattagtgtaattaattaaagcaagataatacgtatgtttgatcaattttcgaggcgataaccggccataaaaaagcgcaacgtagaacaggaattattctcacgaaagaaatccattaccatctctttatccagtccatagcggcgcgtcagaatacccgcttcccaggcgctaagctggcgatctccggtcttttcgtacatccggtgactgtagcctaatacaaaaccgcgtttataatcggcacagaattttgtcacattaaccgcactgtcggcatgcgttgcttttaatcccgccattaagcctttaccaaaatggttattcatcgttcacctcattcgctatatattgtcatatatagcgatattttaggcaaagaacgacttttgcgcacgctattttttcatgcttgtttaagacgtaatcccgtaagagataaacctatcaggagagatatttatcgaaccatttcagtgtcctttgccaggcaagatcggcggcagatttgtcataacggggcgtggaatcattatggaatccgtgattaacccccggatagatatacgcctcataaaccttattattggctttcaacgccgcctcgtaagcaggccagccctcgttgattcgggtgtccagttccgcgaagtggagtagtaaaggcgcttcaatcttcgccacatcggcagtgggtgcctgacgaccataaaacggcaccgcgcaggccagttccggatacgcgacagccgccgcgttgcttacgccaccgccatagcaaaatccggtaatacccactttgcctgtcgcttgcggatagcgttgcataaactcaattgcggcaaagaaatcattcatcagtttgttggatcaacctgctgttgcagctcacgacctttatcatcatttcccggataacctccaacggaacttaagccgtcaggtgccagggcgatataccccgccttcgccactcgccgtgccacatcttcgatatacggattcagtccacgattctcatgcaccaccactacggctggcgttttgccgctcatctttgcgggcttcaccagataaccccgcacctcgccgtgaccatttgggctaggatacgtgatgtactcagcaacaatttccgggtcggtaaactctacctgagtcgccagcgcataatttggcttgagcaaatcaaacaacgctaatgccgtcatcccgcctaccgcacttcgccgcaaggttgaggaactcacgtttcgagattttcccgtgagcgtaatagtcatagtaatccagcaactcttgtgggaaatctttggcggttaaacgcggcatcgttgcactcctcagttggtgtttttttaagcaaagcataagcacgtatttttgcccagtttttcgtcactctgtgagccagactacgggatacgcgctggcgaatcgctaaactagaaacattgtttcgaaattgaacggtggaaaggagaggtcatggtctggttagcgaatcccgaacgttacgggcagatgcaataccgctattgcggaaaaagtggtttacgcctgcccgcgttaagcctcggtttatggcacaatttcggtcacgttaacgcgctggaaagtcagcgtgcgatcctgcgtaaagcgtttgatttgggcattacgcactttgatttagccaacaattacgggccgcctccaggaagcgcagaagagaactttggtcgcctgctgcgggaggattttgccgcttatcgcgatgaactgattatctctaccaaggctggctacgatatgtggcccggcccttacggctctggcggtagtcgtaaatacctgctcgccagcctcgaccaaagcctgaagcgtatggggcttgagtatgtcgatatcttttactctcatcgcgtcgatgaaaatacgccgatggaagaaaccgcctctgcgctggctcatgcggtacaaagcggtaaggcgctgtatgtcgggatctcctcttacagcccagagcggacgcaaaaaatggtcgagttgctgcgcgagtggaaaattccgctgttaattcatcaacctagctacaatttactgaaccgctgggtggataaaagcggcctgctggataccctgcaaaataacggcgtgggctgtattgcctttactcctctggctcagggattgctgaccggaaaatatctcaacggcattccgcaagatagtcggatgcatcgtgaagggaataaagttcgtggtctgacaccgaaaatgcttaccgaagccaacctcaacagcctgcgcttattgaatgaaatggcacagcagcgtggacaaagtatggcgcaaatggcgttaagctggttgctgaaagatgatcgcgtgacgagcgtattgattggtgccagccgcgcggagcaactagaggagaacgtgcaggcgctgaataatctgacatttagcaccaaggagctggcgcagattgatcagcatatcgccgatggcgagctgaatctgtggcaggcgtcttccgataaatgacctgttaataacgggcgcgcgaaccgcgcccgaatcagatcagtgattatgacgagtcagtcggtcaagatagcccatcacaaatgcagaaagcacaaacgtcagatggataatgacgtaccacatcagtttgttatccgggacatttttcgcatccataaagacgcgcagtaagtgaatggaagaaattgccacaatgctcgctgctactttgtttttcaggctcgttgcgtccattttccccagccagttcagcttctctttgttctcggagatatccagctgactgacgaaattctcataaccggaaaacatcaccatcaccagcaaaccgccaaccagcgtcatatccaccaggctcagcaacacgaggatcaaatcactttccgccatgctgaagatattcggcagtacgtgaataatctcctggaagaacttcagcgccagggcaactaacgccaggctaaggccaaagtacacgggggcaagcagccagcgagaagcatacattgcattttcaagaaaacgttccatacattcctgtcgtgtagttaaaacgggcaacagtatatcgcaattgagtaaacagcacgcaacagcaaatcaacatatacgttaaacctttgtcgcataattctgaggtttagggatcttcctggttcccttatcaacgcatcgagaacgtctacccttaaaggacgttgaacctgaagggagaaaaacgatgtctcatttaaaagacccgaccacgcagtattacactggtgaatatcccaaacagaaacaaccgacgccaggcatccaggcgaagatgacaccggtaccggattgcggcgagaaaacctatgttggtagcggtcgcctgaaagatcgtaaagcactggtgacagggggcgattccggaataggtcgcgctgccgccatcgcttacgcgcgtgaaggggctgacgtggcgatcagttatcttcccgtggaagaagaagacgctcaggatgtgaaaaagatcattgaagaatgcggacgcaaagccgttctgctgccaggcgatttaagcgatgagaaatttgcccgtagcctggttcacgaagcgcacaaggcgttaggcgggctggatattatggcgctggtcgccgggaaacaggttgccattccggatattgcagacctcaccagcgaacagtttcaaaagacctttgccattaacgttttcgcgctgttctggctaacccaggaagcgatccccctgctaccgaaaggtgcaagtatcatcaccactagcagtatccaggcataccagccaagtccgcatttactggactatgcggctacgaaggcggcgattctgaactacagccgtggcttggcaaaacaggtcgcggagaaaggtattcgggtgaatattgtcgcgccaggcccgatctggacagcactgcaaatttccggcggacaaacgcaggataagatcccgcagtttggtcagcaaacgccgatgaaacgtgcggggcaaccggcggaactggcccctgtatatgtttatctggcaagtcaggagagcagctacgtcaccgcagaagtgcacggcgtgtgcggcggcgagcatttaggttaaaaaaatgcccggttgtgaaaagcaaccgggcatcattgtgaattcactcttacctgatgtggcgaaaacgccttatccgcctacaaacgcatgaagattcaacatgttgcaatagattttgtaggcctgataagcgtagcgcatcaggcattgagcacctaatgccggatgcgtcgtgaacgccttatccggcctacaaacgcacgaagattcaacatgttgcaatagattttgtaggcctgatgagcgtagcgcatcaggcaattctactttacttcgctttggcggtttcttcgccgaccagacctatcttcaggtaacccgcctgatgcagcgtatccattaccttcatcaacgtctcgtaatcgacggttttgtccgctcggaagaagatggtggtgtctttcttgccttcggttaacgcattcaacgccgtaatcattgtttcatcggtgaccggatcgttaccgataaacatgctgttgtctgccttcacgctcagataaaccggtttttccgggcgcggctgcggcgtgctggtagaagcaggcaagttcaccttcacatctaccgtcgctaacggtgccgccaccataaagataatcagcagaaccaacatcacgtcgataaacggcgtcacgttgatatcatgcatttcgccgttatcgtcgaggttttcgttaagatgcattgccatcggatattatcctgcgcgtaatttttgtgcgacacgaaccggatgcgcagcggcgctggcttccagatccaggtcacggctttgcagcaacaatacctgcgctgcaacatcacccagcatcgctttaaagccgccaatctggcgtgcaaatacgttatagataacgaccgcaggaatcgctgccacgaggccgattgccgttgctaacagagcttctgcgatacccggcgcaacgactgccaggttagtggtctgcgtttgcgcgataccaataaagctgttcatgatgccccagaccgtaccaaacagaccaacgaacggagaaatcgcgccgatggttgccagatagccgttaccgcggcccatttgacgacccactgcggcgacccgacgctccagacggaagctggtacgttctttaataccttcgttatcgtcgctgccttcactcagttccagctcattctgcgcttcattgagcaaatgcaggcttaagcttttgctaccaaaatcagcggcgatatcgttggcctggtttaaggaacgcgcttcagccagcagttgctgctcgcgcttaaggcgacgcttctgattgaagaactctacgctcttactgaagaagattgcccaggtgactacggaggccaaaataagcccaatcatcacgcacttaacgacaatatcggcgtgctgatacataccccagacggaaaggtccgtctgcattaaattattacccactgtgtatctccaggacgcaagtcacaaaatctgcgcataataatatcaaaacgacgtcgaattgatagtcgttctcattactatttgcatactgccgtacctttgctttcttttccttgcgtttacgcagtaaaaaagtcaccagcacgccatttgcgaaaattttctgctttatgccaattcttcaggatgcgcccgcgaatattcatgctagtttagacatccagacgtataaaaacaggaatcccgacatggcggacaaaaagcttgatactcaactggtgaatgcaggacgcagcaaaaaatacactctcggcgcggtaaatagcgtgattcagcgcgcttctagcctggtctttgacagtgtagaagccaaaaaacacgcgacacgtaatcgcgccaatggagagttgttctatggacggcgcggaacgttaacccatttctccttacaacaagcgatgtgtgaactggaaggtggcgcaggctgcgtgctatttccctgcggggcggcagcggttgctaattccattcttgcttttatcgaacagggcgatcatgtgttgatgaccaacaccgcctatgaaccgagtcaggatttctgtagcaaaatcctcagcaaactgggcgtaacgacaagttggtttgatccgctgattggtgccgatatcgttaagcatctgcagccaaacactaaaatcgtgtttctggaaagcccaggctccatcaccatggaagtccacgacgttccggcgattgttgccgccgtacgcagtgtggtgccggatgccatcattatgatcgacaacacctgggcagccggtgtgctgtttaaggcgctggattttggcatcgatgtttctattcaagccgccaccaaatatctggttgggcatagtgatgcgatgattggcactgccgtgtgcaatgcccgttgctgggagcagctacgggaaaatgcctatctgatgggccagatggtcgatgccgataccgcctatataaccagccgtggcctgcgcacattaggtgtgcgtttgcgtcaacatcatgaaagcagtctgaaagtggctgaatggctggcagaacatccgcaagttgcgcgagttaaccaccctgctctgcctggcagtaaaggtcacgaattctggaaacgagactttacaggcagcagcgggctattttcctttgtgcttaagaaaaaactcaataatgaagagctggcgaactatctggataacttcagtttattcagcatggcctacagctggggcgggtatgaaagcttgatcctggcaaatcaaccagaacatatcgccgccattcgcccacaaggcgagatcgattttagcgggaccttgattcgcctgcatattggtctggaagatgtcgacgatctgattgccgatctggacgccggttttgcgcgaattgtataacattgccacttttggacaattttgcagacattttattgtgaaaagtcttaaattgttgcgtccgggatcaaggcgtcccggacgattcaggagtacaataggcagataaaggcttaaacgctgttccacaggaaagtccatggctgttattcaagatatcatcgctgcgctctggcaacacgactttgccgcgctggcggatcctcatattgttagcgttgtttactttgtcatgtttgccacgctgtttttagaaaacggcctgctgcccgccagttttttgccaggcgacagcttgttgatactggcaggcgcattgattgcccagggggttatggattttctgcctacgattgcgattctgaccgccgcagcaagtctgggctgctggctaagttatattcaggggcgctggttagggaataccaaaacggtgaaaggctggctggcacagcttcctgctaaatatcaccagcgcgccacctgcatgtttgaccgccacggtctgctggcgctgctggctggacgttttcttgcatttgtccgtacgctgctgccaaccatggcgggaatttccggtctgccaaaccgccgcttccagtttttcaactggttaagtggattgctgtgggtcagcgtggtaaccagttttggctatgccttaagtatgattccgttcgttaaacgccatgaagatcaggtaatgacgttcctgatgatcctgccaattgccttgttaaccgctggcttgttaggcacgctgtttgtggtgattaaaaaaaaatactgtaacgcctgacgattttccccgttcccggttgctgtaccgggaacgtatttaattcccctgcatcgcccgcattcttgccgcatcttcccccggcgtcacaccgaagtaacgtttaaactcacggctaaattggcttgcgctttcatagccgacgcgcatcgctgctgcgctggccttcatgccgtcatggatgatcatcatccgcgccttatgcagacggtaattcttcaaatactgcaacgggctggtactggtgacagacttaaaattatggtggaacgcgcttacgctcatgttggcttctgccgccagttgctcgacgctcaggttttcggtgtatttattctcaatccgtttcagcacgcggctaatcagactgaagtgagtctggcgactgaccagcgccagtaacgcgccgccgcaaggtccggtcagcacgtagtacagaatttcgcggatgatctgtttgccgagaatacgcgcatccagtggtcgctccatcacgtcgagtaaccgctccgccgcgcataaaatctcttcacttaacgtggcggagttaatcccgctggctgccatgctcggctggaaatgctcatcttcgccaatgtccatcaacagttcctgtaactgcaaaatatcgacattgagacgcaaccctgccagcggcacctcactcgtggcataggtttcgcactcaaacggcaacggcaccgtcagcagcaggtattcattggcatcataacgaaacacgcgttcattgatataaccgattttatgcccggaaaagagaattatgatgccaggctcgtacatcaccggtgtacgtgcgaaaggcgtctcgccatacaacaaacgcacatcgggcaacagtccactcaaactattttctttatttttcagtttattaactttatccgccagcaagcggcaaatctcttcacgtttcatatcgcgtaatttcttaggaataatgcggcaattactttgtgcgcaattttgtagcatttctccagcactctggagaaataggcaagacattggcagaaatgagcattgagagccagggcgctggcgatcacaatgaaaaacatcaggcagatcgttctctgccctcatattggcccagcaaagggagcaagtaatgaacaactttaatctgcacaccccaacccgcattctgtttggtaaaggcgcaatcgctggtttacgcgaacaaattcctcacgatgctcgcgtattgattacctacggcggcggcagcgtgaaaaaaaccggcgttctcgatcaagttctggatgccctgaaaggcatggacgtgctggaatttggcggtattgagccaaacccggcttatgaaacgctgatgaacgccgtgaaactggttcgcgaacagaaagtgactttcctgctggcggttggcggcggttctgtactggacggcaccaaatttatcgccgcagcggctaactatccggaaaatatcgatccgtggcacattctgcaaacgggcggtaaagagattaaaagcgccatcccgatgggctgtgtgctgacgctgccagcaaccggtagtgaatccaacgcaggcgcggtgatctcccgtaaaaccacaggcgacaagcaggcgttccattctgcccatgttcagccggtatttgccgtgctcgatccggtttatacctacaccctgccgccgcgtcaggtggctaacggcgtagtggacgcctttgtacacaccgtggaacagtatgttaccaaaccggttgatgccaaaattcaggaccgtttcgcagaaggcattttgctgacgctaatcgaagatggtccgaaagccctgaaagagccagaaaactacgatgtgcgcgccaacgtcatgtgggcggcgactcaggcgctgaacggtttgattggcgctggcgtaccgcaggactgggcaacgcatatgctgggccacgaactgactgcgatgcacggtctggatcacgcgcaaacactggctatcgtcctgcctgcactgtggaatgaaaaacgcgataccaagcgcgctaagctgctgcaatatgctgaacgcgtctggaacatcactgaaggttccgatgatgagcgtattgacgccgcgattgccgcaacccgcaatttctttgagcaattaggcgtgccgacccacctctccgactacggtctggacggcagctccatcccggctttgctgaaaaaactggaagagcacggcatgacccaactgggcgaaaatcatgacattacgttggatgtcagccgccgtatatacgaagccgcccgctaagctttttacgcctcaaactttcgttttcgggcatttcgtccagacttaagttcacaacacctcaccggagcctgctccggtgagttcatataaaggaggaacgtatggctaatccaaccgttattaagctacaggatggcaatgtcatgccccagctgggactgggcgtctggcaagcaagtaatgaggaagtaatcaccgccattcaaaaagcgttagaagtgggttatcgcagcattgataccgccgcggcctacaagaacgaagaaggtgtcggcaaagccctgaaaaatgccagtgtcaacagagaagaactgttcatcaccactaagctgtggaacgacgaccacaagcgcccccgcgaagccctgctcgacagcctgaaaaaactccagcttgattatatcgacctctacttaatgcactggcccgttcccgctatcgaccattatgtcgaagcatggaaaggcatgatcgaattgcaaaaagagggattaatcaaaagcatcggcgtgtgcaacttccagatccatcacctgcaacgcctgattgatgaaactggcgtgacgcctgtgataaaccagatcgaacttcatccgctgatgcaacaacgccagctacacgcctggaacgcgacacacaaaatccagaccgaatcctggagcccattagcgcaaggagggaaaggcgttttcgatcagaaagtcattcgcgatctggcagataaatacggcaaaaccccggcgcagattgttatccgctggcatctggatagcggcctggtggtgatcccgaaaagcgtcacacctagtcgtattgccgaaaactttgatgtctgggatttccgtctcgacaaagacgaactcggcgaaattgcaaaactcgatcagggcaagcgtctcggtcccgatcctgaccagttcggcggctaacatgcaaattctcccggtggcggtaatgttccgctaccggacttttcagaaatcatttattcccctcgcgtcccgcccgttgttactcttccttgttcaggaatgccaaatataaggacatcatcatgcagagccggaagctcttaaaagaacaactcatctatatccgggataaacgcaacggagaggtgaaaaacagatgaaaataatacttctgtttttagcagccctggcaagttttaccgtacacgcacagccccccagtcagaccgtagaacaaacagtccggcatatttatcagaactataaaagtgatgccactgccccttattttggtgaaaccggagagcgggcgataacttctgcgcgtattcaacaggcgcttaccctgaacgacaatcttacgctgccgggcaatattggctggctggattatgatccggtttgtgattgtcaggattttggcgatctggtgctagaaagcgttgcgataacccaaactgacgccgatcatgccgatgccgttgtgcgctttcgtatctttaaagatgataaagaaaagaccacgcagacactgaaaatggtggcggaaaatggtcgttgggtcattgacgatattgtcagcaatcatggcagcgtcttacaagcagttaatagcgagaatgaaaaaacgctggccgctttagctagcttgcaaaaagaacagccggaagcctttgttgccgaactctttgaacatattgctgattatagctggccgtggacgtgggtggtttccgactcttaccgccaggcggttaatgccttctataaaaccaccttcaagacggccaataatcccgatgaagatatgcaaatagaacggcaatttatttacgacaatccgatctgttttggcgaagagagcctatttagtcgcgttgatgaaattcgagtcctggagaaaaccgccgattccgcccgcattcatgttcgttttacgctgaccaatggcaacaacgaagagcaagaactggttttacagcggcgcgaaggcaagtgggaaatcgctgattttatccgcccgaacagcggcagcctacttaagcagattgaggcaaaaactgccgccagattaaagcaatgagctgaattaaataacaattagccggaacaataaataaaagggaacactatatgaaaacgattttcaccgtgggagctgttgttctggcaacctgcttgctcagtggctgcgtcaatgagcaaaaggtcaatcagctggcgagcaatgtgcaaacattaaatgccaaaatcgcccggcttgagcaggatatgaaagcactacgcccacaaatctatgctgccaaatccgaagctaacagagccaatacgcgtcttgatgctcaggactattttgattgcctgcgctgcttgcgtatgtacgcagaatgataaaaaaatccccggtagcgtgtcagttgccggggatattttttaacgtccaaccgccgctttaggccgtttcttcgcaccagcattcaccggacgagattgcgtagagctcgctttttttgccgtagcaggcgtctgacgctgggtcgccatcggcgtatgtttcgtcaacgccggacgggtattgcggttctggcgacgagcttcacgcatctcttcaatggttggcgcaggcactaagcaatcgcgacggctgccaatcagatgctttttgcccatcgcttccagcgcctggcggattaacggccagtttgccggatcgtggtaacgcaacaacgctttatgcaaacgacgctgtttgtcgcccttcggtacgaagacgtcttcgctcttataaccaatcttcgccagcgggtttttcccggtgtaatacatggtggtactgttcgccagcgggctcggatagaagttctgcacctggtcgaggcggaagcggtgctttttcagccacagcgccagattcaccatatcttcatcacgcgtaccggggtgcgcggagatgaaataggggatcagatactgctctttacctgcctgtttactgtaagtatcgaacagctctttaaagcggtcatagctgcccatgcccggcttcatcatcttgcttaacggcccttcttcggtatgttccggggcaatcttcagataaccgccgacgtgatgggtcgccagttctttgatatagcgcggatcttctacggctatgtcataacgcacaccagaggcaatcaggatctttttaatgcctttcagatcacgcgcacggcgatagaggttgatcgttggttcgtggttcgtgtccatgtgcggacaaatatccggataaacgcagctcaaacggcgacaagtttgttcagcgcgtgggcttttgcagcgcaacatatacatgttggcagttggcccaccaagatcggaaatcacgcccgtaaaacctggaacggtgtcgcggatcgcttcgatctcattaatgatgctatcttcggaacggctctgaataatgcgcccttcgtgctcggtgatagaacagaaagagcagccgccaaagcagccacgcataatgttgacgctaaaacggatcatttcgtaagccggaatacgggcattgccataggccggatgtggcacgcgcttgtatggcagcgcaaaaacgctgtccatctcttcggtagaaagcggaatagcaggcgggttgatccacacatagcggtcgccgtgtttttgcatcaatgcgcgggcacagcctgggttggtttcgtggtgcagaatacggctagcatgggcgtacagcactttatcgcccttcactttctcgaaagaaggcagcaacacgtaggttttttcccacggtttcgggcgcggtggctgcacggttacggctttggcttcctgctttttcggtgccaccggtttgttatccgcgcacggcaaatcttcaccatacggatgcgggattgggtcgatttttccaggggtatcaagacgggtggaatccacgccgctccagccaggcagcgcctctttcacgataatcgcggtattacgcacatcgcggatttcactaattggctcgcccatcgccagacgatgcgccacttccaccagcggacgctcaccgttaccaaacatcagcatgtcggctttgctatccaccagcacggaacggcgcacggtatcggaccagtaatcataatgcgcggtacggcgcagactagcctcaataccgccgaggatcaccggtacatctttccacgcctctttacaacgctgggtataaaccagtgtggcgcgatccgggcgcttacccgcgacgttatccggcgtgtaggcatcgtcatgacgtaaacggcgatcggcggtataacggttgatcatgctatccatgttgccagcagtaacaccgaaaaacagattcggtttacccagacgcataaagtcgtctttgctgctccagtccggctgggcgatgatcccgacgcgaaagccctgcgcttccagcatacgaccgcaaatcgccatcccgaagcttgggtgatcgacatacgcgtcgccagtaaccaaaatgatgtcgcagctatcccagccaagttgatccatctcttcacgagacatcggcaaaaacggtgccggtccaaaacaggcggcccagtactgcggccaggagaacaggtcgcgatccggttggatcagggagatagagctcattttgcttccagaaatgataaaaaaataatcaaaggccggggattataagccggaacgaaagagaaatcgaaaggtattccatactcgccctcctcgggcgagtatgaagattacggtaccggattgaccaacagttgcccaatgctgccacggtccgccatttccagcgtctgactgttgaagtagaacgggaagtgcgcccaggaaggctgaccgaaataaacaagcagctccacttgtccgtcaacccaaacggtatctttccagcctctgtcttccgggaacggcatcgcgccattcacgttacggatctggaacattacgccttcaatatggaacgcttgcggctcgtccgcgcgtaccgtccagcgttcccacgttccttgctgcgcggtgacatcaatacggttgacgtcccacagctgtccattaatacccgggtcatcacccagactgatatcgcgactgcgaattgggctaccagccatgatttcagttggcagcaagcgcatcggaagactgtctgtgaccagcggcagaaggccggttgggcgcagcgttagcaccagggtagaaaccagaatactggatggctcaaagaagccacgaatacgatcaacaatgctcgccgcttcgccacaggtgatgctcacttcatcgccgttgctcatatccaccagaatctcgcggcgctcgcccggtgccaggctaagttgcttcacgcttacaggagcaggcaggaatccctgatcgccagaaatcacatgtaacgggcgaccatcgttcatctgtagttgatagcgacgagagttgctcgcgttcagcagtcgcaagcgcacccagccacggctgacttcaacgtacgggctttgtacaccgttaaccagcagcgtatcaccaacaaagccgccgcttcccggttcgttgtattctggcgtaccaaagttatccagccgtttatcctggataatgaccggaaaatcatccacaccataatggttggggataggcaggctcttgctgacttcatcttccaccagccacattccggcaaggccgttatagacctgctgagccgtgcggttgggagtattggcgtgataccacagagtagctgcgttctggcgaatgggcagtacgggtgcccagtcagcgtttgggctcatcatccgtgccggaccgcccatcagcgggcctggtacctgtagcccggccaccgtcatactgacattttctgtcaggcggttgctgtaaataagcttaacatcgtcgcccttccagacgcggatagtcggccccaggtaacgaccattgattccccagacgctcgcgcgtgtccctggcgtaaaactccagtgcgcacgttgtacagtcataaacagcggttgcccacggcgagattcaagtagcggcggaacgggtagcggttgctgttgcccggctgcgctggccttcaggggaacagcgcctgcacaaagtgcaatcccgcttgcctgaatgaactgacgccgactgagactcatatttgctccatgtaaaactggctaaagtaataccgtgcaggaaagtgttccccgcaaaaatacagattgccgacttaaacttttccggcggcttcgcgttctgcgacttctttatcgagctcggcgattttttgttccattatgctacgacaatgggcagccagctcacgaacctgatctttgccatactgactgacgtcaattggcggcagcatttcgacaatcaccagaccgttgtgcagtcgattaagattaatcttattgctagttgtagagacgcacacgggaataatcgggacgcccgccgcaattgccgcgtgaaatgctccagtcttgaacggtagcaggccgcgaccacggctgcgggttccttccgggaacatccagatggaaatacggcgttttttgaagtgattcactacttccgcaatggtgccgtgagctttagtgcgattgtttctgtcgatcaataagttgccggttaaccagtacaactgcccgaagaaggggatccacagcaagctctttttacctaccgtcaccgtcggcggttgcacgatgttgcttgctgtcaccatgtcatagttgttctggtggttagcgatatagatagcattgccgtagctttcagcgtctgtaggtttacggcactcaactttcaggccaaacagcggcgcaagacggccaaacatatgcccaaaggtggccacatgtttcgggttacgcgggctgaaaaggcagtaaatggagccgaatacacagactaagatgctgtaaatcacggtaataataagacgaaagatatatagcataacaccctctgaaggtctgagagactggcattgtacgtcacctgaaatcaggttagggcattgttaaaagccgctctctggaaaagcgtattgttaatcgcaacgcatgaataaacaacggtttcaagggaatttttatcgtttccgggggttgaatacgctgccggatgacgacttaacgtttcatccggcgttccttgcaagcgggaggaaacagcgccctccccggcatattactcttcgctatcaccgctgctggcacggcgaggagagtcgatctcaacacgatcgatacgctgcaaaccgcgcatcaacgtaccgcggcgtccacgttcgccagtgactttctgtaactcttccgggcgcagtttaattttgcgtttcccaacatgaatggtcagcgtgctttgcggcggcagaacgtacaattgcgccagaccatcttctccacgcgcggcttctgcgcttggaatgttgataatcttgttgcctttgcccttgctcagctgcggcagatcacttaccgggaacatcaacatacggcctgcctgagtgattgccagcagcatatcggaagcatcttcaatcaccaccggcggcataacatgggcattttccggtaaggtgatcaaagccttacctgcacggttacgcgccaccagatcgttaaaggtgcagacgaaaccgtaacccgcatcggaagccatcagcagtttctgatcgtcgctttccatcagcatatggtcaacggtcgccccaggcggcaacgttaatttgccggtgagcggctcgccctgaccacgcgcgctcggcagcgtaatcgggtcaatggcatagctacgaccggtggaatcaacaaacactaccggttggttgctcttacctttcaccgccgctttgaagctatcacccgctttataattcaggcccggcgcgtcgatatcatggcctttagcgctgcgtacccagcccatctggctcagcacaatggtgacaggttcagacggcagcatgtcgtgctcgctcatcgctttcgcttcttcgcgttcctgcaacgggctacgacgatcgtcaccgtaggcttgcgcgtctgcctgcagttctttcttcagcaggttattcattttacgctcggaagccaaaatgccctgcaactggtcgcgctctttttccagttcactctgctcaccgcgaatcttcatctcttccagtttggcaagatgacgcagtttcagttcgaggatcgcttccgcctgggtttccgtaaggccaaaccggctcatcagcgccggtttcggttcatcttcattacgaatgatctcaatcacttcgtcgatattgagaaacgccaccagcaaaccttcgaggatatgcaggcgcttgaggactttctccagacgatagttcagtcggcggcgcacggtatcgcggcggaacaccagccattcggagaggatttccagcaggtttttcaccgccggacgaccatccagaccgatcatattaaggttaatacgatagctcttttccagatcggtggtagcgaagaggtggttcatcacctgatccatatccacgcggttggaacgcggcacaatcaccaggcgggtcgggttctcgtggtcagattcatcgcgcagatcgtcaaccatcggcagctttttgttgcgcatttgcgcagcaatttgctccagtacgcgcgcaccactaacctgatgcggcaatgcgctgataaccaccgcgccatcttctttcttccacaccgcgcgcatacgcacactaccacgtccgttctcgtagattttacggatctcggcgcggctagtgataatttccgcttcagtcggataatccggcccctgcacgatatccagcagctgatcgagcgtggttttcggctggtcgattaatgcgattgccgcctgagccacttcacgcaggttatgcggtggaatatcggtcgccatgccgacggcaataccggtggtgccgttaagcaaaatgtttggcagacgggcaggtagcattttcggctcctgcaaagtgccgtcgaagtttggcacccagtcagccgtcccctgccccagctcgctcaatagcagctcggaatatttgctcaaccgggattcggtgtaacgcattgccgcgaagcttttcggatcgtccggcgcgccccagttcccctgaccatcaaccagcggataacggtaagagaacggttgcgccatcaggaccatcgcttcataacaggcgctatcgccgtgcggatggtatttacccagtacgtcaccgacggtacgggcgctttttttaaatttggcgctggcattcaggcccagttcagacatcgcatacacaatgcggcgctgaacaggtttcagaccatcaccaataaacggcaacgcacggtccatgatcacgtacatggagtagtttaagtaggcgttttccgtaaattcatgtagcgcaaggcgctctgccatatcgctcattaattctgattcctcaacttattcgccagccttcaaaggggcaatattgccggagatactacattatctgccgcgtcgagtcacaggagatcaacgtgaatagcgccgccggacgtgctccgacggcgataaaggcatcaatgtgccttgatatacaactctttgctgtagacataatcctggggattatgcagcggaaaaccgccaacgtagggtttaagcagtttgattaacggctgatagtagataggaatcagcggtgcctgttggttgatgatcacttctgcctgctgatacaacgcattacgctttgtcgcatcagtgatctgcgtggcctggtttagtaaggcgtcatactgcgcatttttccagtgaccgacgttttcttcactatcgcttttgagcgtgttcaggaagctggaagcatcattgtacgtcgcatcccagctctgccgagacagcatgaaatcaccggctcgtcgggcatcaagataggttttccactccattgtgcgcagcgtcacctgtgcacccagccattttttccattcggaagacaacgctatcgcggtcttttcatgcagatcgtacttgttgtagaacagctcaaagcgtagcggatgagaggcgtcgtatcccgcctgtttcagcaaggcttttgccatcgcgacgcgctcactcattggcttttgcagttcatcgaacgtcgtcgcgctaaagccttttacctctggcggcgtcagcgtggttgcgggcgttctcaaccccagtaccttttgcgcaataagctgtcgatcaaccgtaagatatagcgcccgacgcactcgcacatcgttaaatggcggtttctcaaggttgaagttgtaatattcgctgttcagacgcggaataattcgtagctcgccaggcagacttttttcaatggcgggaatttgctgcgccggaacccaggtgagatcgacctctcccgcgcgatagcggttatagccggtgacgctattatctagcgccagatactcaacctgttgcaatactgtatgttgcgcatcgcggtactttggatttttgcgtgcagtaatcttttcgttaactacccactgatcaagcacaaaggcaccgttgtaaaccatgttctctggcttactccagctatcgccatgtttagcgatgacatgatgaggaaccgggaacagcgtcggccaggcgagcatcgtcgtgaaccaaggaaccggctgctcaagcgtaacttcaagagtacgatcatccgtcgctttgacacccaggcttgtaacatctgctttacccgcaacaatagctgcggcattgttaatgtgcgcctgtgccagatagccagcaaaagggcttgccgttttcgggtcaaccgcgcgctgccagccgaggacaaaatcctctgccgtcagaggctgaccgtcggaccactgcaaaccgctacgcagatggaaaatatagcgcttgccgccgtccagtatctcccagcgttcagcctgagcgggctgcacctggccttcaccgtccatccataccagaccttcaaacagatccagcacaatctgcgcggcagtattctcctccaccttttgcgggtcgagcgtacctgggtcgctatgattgttgtaacgaaagacttgttgcggggcgagcggtgtgttggcgggaacgtcagcagcgtagagaggagccgcacttaccaggctgaccagccataataaatttcgcgtatacatggtattccttaccggagaaattataagcccaacaacaatacgcctgtggcattgttcgctcaaacttatcgcgagtgatttggctcacactccggtaaagaaaaaagcgagttgcccccgcttttccattaattaacggatttcattcaatagttctggatgcttatccagaacacgtaaaagtttgattgtggaaggatgaggttgggcattgcctttttcgtaacggctaaacgcatttacacctcccccaaaaatttcgcttgcctctttttgggtaagagagagcttttttcgaaccttcactataaattcaggtgccactgtttcggcattcacgctagcccgaaatgcctttacttgcgccatgaaagcatcactctcttctttattcatgatgctctcttcgcaatggacacaatataaaccgtggatacctttcaatactgtttttcgtccacggaaggtgtatggaatatctttaatgccagaaaccatttctccctggtggcaaaccggacatttcatattacttctccttaaagctgacgatcagtacgtcatgaattaccgtaattttaagataaacctggcctgtaacaagcctgggtctgtaaacatcctgccagatagtatgatcagagtaggtggtcatgcttttataaaagtcgctctcacttaatccaatgataacattacacataccatcaaaatccaaacctaactcatctgcatttaacagggcactacgtgttgtacgaacttgcccggcattgacaagttttttaacctgactcaaacgtgtatgtggtgtgcgtttttccataacccccgcctccctgttactttagttataacctaaaaggttaattacagcaatgaaaaagcacctaaaaggttagttagatgtacggagatagtgaccacacaaaacgtattctttaaggaaagtgattgaccatataagaaagtggcgcattagtagcgccagtttgaagcaggaatttataagggaagctggagtcaggcatcacgccaacggcacataaacatccgtttccagtcgctgctctgtcaccccttcggcaagattggtgtagtgaaacagaatcggtgctttacgcattttctcgccgcttgcaggcagccagtggcgaatgatgccccataccgtgtgactaatatcgtccagctcgccaacgtggcgggccacggcataacgtccaccggtaagttcaccattgctcacaccataacgattatcgggaatcggttcgctaacgctgccgcagatatcaaagcgaaacgcttccggtgcggtggtggcagggtcgtcccaggcgacgccaaaagtctggctttggttaacaggagaaagcccgtctctttacgccacatgataaatttcgccacgctgtagttgagcaattcagggctacagcggtgcggcaacatcgccacaggtatacttgggaaatcgataatgtttacatccagtgtcaggtttgtcattttgcctccctgcgaaattattcccgggaacgcgtcccgggagcggtaacaattacggatttactttgcggatctgtttgacgtcaatttcaacagaattccagtctttatcgacttcaccctgaatctcaaccgtatctttcggcgtcaccgtcacgccgttccagcgtttgtggtcgatatcaacattgatagtaccgctggcatctttgaacacgtagagatcgtcagagatgcgttcaacgatattgccgcgcagggttacccaggtgtcgtcacgcagggattttgcgctttctacagtcgttacgctgccgttcggcccctggaatcctccggcctgactttgcgttgcgcttgggccagaaaaaccgccctgctctgctgccatcaccggtgcgctgcacagggccattactgcgattactgctgcgaattttttcatgtttattactccctttaatgtctgtttccgagcatttaacaagatagtccttaacaacttcttaagggaaaaaaataaaatttagtgctgtacagagcgcgttacaacacggtttactggcagcaaatacggttatcgcagggatgaaaaaatgcgaattttactgatagaagatgacatgctgattggcgacggcatcaaaacgggccttagtaaaatgggttttagcgtcgactggtttacacaaggtcgtcagggaaaagaggcgctttatagcgcaccttatgatgcggtgatcctggatttaaccttaccaggcatggatggtcgcgatattttgcgcgaatggcgagaaaaaggtcagcgtgagccggtactgatcctgaccgcgcgcgatgcgctggcggaacgtgtagaagggctgcgtctgggagctgacgattatctgtgtaaaccttttgcgttgatagaagtcgccgccaggctggaagctctgatgcgccgaaccaacggccaggccagcaacgagctgcgccacggtaacgtcatgctcgaccccggcaaacgtatcgccacgctggctggcgaacccttaacactgaaaccaaaagaatttgccctgctggaattactgatgcgtaacgctggtcgggtactgagccgcaaactgattgaagagaaactgtatacctgggacgaagaggtcaccagtaatgccgttgaagtgcatgtgcatcatctgcgacgcaaactcggtagtgattttattcgtaccgtgcatggtattggttacacattaggtgagaaatgaaatttacccaacgtcttagtctgcgcgtcaggctgacgctaatctttttaattctggccagcgtgacctggctgctttccagctttgtcgcctggaaacaaacaacggataacgtcgatgaattgttcgacacccaactgatgctgtttgccaagcggttaagtacgctcgatctcaacgaaatcaacgcggcggatcgcatggcacagacgccaaatagattaaaacacggtcatgttgatgacgatgcgctgacctttgccatctttacccacgacggcagaatggtccttaatgatggcgataacggagaagatattccctatagctatcaacgggaaggttttgctgacgggcaactggtcggtgaagacgatccttggcgttttgtctggatgaccagtcctgatggcaaatatcgcatcgttgttggccaggaatgggaataccgtgaagacatggcgctggcgattgttgccgggcaattgatcccgtggctggtcgcactgccgattatgttaatcatcatgatggtactactgggtcgtgaactcgcgccgctgaacaaactggcgctggcactacgtatgcgtgaccctgacagcgaaaaaccactaaacgcgactggcgtacccagcgaagtgcggccactggttgagagcctaaatcaactgttcgcccgcacacatgcgatgatggttcgtgaacgacgctttacctccgacgcagctcacgaacttcgtagcccgttaacggcgctgaaagtgcaaaccgaagttgcgcagctctctgacgatgatccgcaggcgcggaaaaaagcactgctccaattacattccgggatcgatcgcgctactcgtctggttgatcaactgctcacgctaagccggctggacagtctggataaccttcaggacgtcgcggagatcccgcttgaagatctcctgcaaagcagcgtgatggatatttaccacacggcgcagcaggcgaaaattgacgtgcgactgacactcaatgcccacagcatcaaacgcaccgggcaaccgctattgctaagtttgttggtgcgaaatttgctggataacgccgtgcgctacagtccacagggcagcgtggtagacgtcacgctgaatgctgataatttcatcgtgagggataacggccccggtgtgacaccagaggcactggcgcgaattggcgaacgcttctatcgcccacccggacaaaccgctaccggcagcgggcttgggctaagcattgtccagcgaatcgccaaattgcatggcatgaatgttgaatttgggaatgcggaacaaggtggatttgaggcgaaggtaagctggtaacttctctgtctatgagagccgttaaaacgactctcatagattttattaatagcaaaatataaaccgtccccaaaaaagccaccaaccacaaaccagacaaataccgaggctgaatacatatacccaaaactcgaacatttcccgcataaagagttttcttaagataagaataataagtggcgtaagaagaaaaaatgctgcaatcattgcttgcaatatacgatcttcgccactaacggaaggtatactgcaaatatttcctccgctctcaagcatccagtcatacttattgaaagcaaaaaaagaatctattaaccaataagtaagcattatatatagcaatgcttcaaatattgttttaattttctgctttaacatatatcagtacgctcataaaaatccatttataattatcaacatgacacgttgatactttcatcttttacttattcaaagccatattttcaatccccaaaaaaaccgaaccaaacgtgtaaattattccggtgcgagtaagaattatgaggaatggctatcagtattgtcattttcagaaaatatttatcctgcatcggtgagtcagagtaagatcagacttttgctaaattcgcaaaagactttgcacattttgctaatttcaccgtaccgctctgtgacgtactatagtcggcaaacgtctcaccttgaggttaaaaaatgagcaacatcctgattatcaacggcgcgaaaaaattcgcccactccaatggtcaactgaacgacaccctgaccgaagtcgcggatggcacactgcgcgaccttgggcatgatgtccgcatcgttcgcgccgacagcgactacgatgtcaaagcggaagtacaaaactttctctgggctgatgtggtgatctggcagatgccaggctggtggatgggcgcgccgtggacagtgaaaaaatacattgatgatgtattcaccgaaggtcacgggacgctgtatgccagcgatggtcgtacccgcaaagatccgagcaaaaaatacggttccggcggcctggtacagggcaaaaaatatatgctttctctgacctggaacgcaccaatggaagccttcaccgaaaaagatcagttcttccacggcgttggcgttgacggtgtgtatctgccgttccataaagcaaaccaattcctcggtatggaaccgctgccgacatttatcgctaatgacgtgataaaaatgcctgatgttccccgctatactgaagaatatcgcaagcatcttgtggaaatttttggttaactagagctcaggctttagaaggagttaaccatgcttaccgtaatcgcagaaatccgtactcgtcctggtcaacatcaccgtcaggcggtattggatcagtttgctaaaatcgttccaaccgtactgaaagaagaaggttgccacggctatgcgccaatggtggattgcgcagctggcgtgagtttccagtctatggcaccggattctatcgtgatgattgagcagtgggaaagcatcgcgcatcttgaagcgcatctgcaaaccccgcacatgaaggcgtatagcgaagccgtaaaaggtgacgtgctggagatgaatatccgtattctgcagccagggatttaatcctgccttgtttgcccggccatcctgaccgggcaatgttctttcctttaaacctcaatctccgccatgtcgcctttctcttgcaaccagttgcggcgatcttcgctgcgtttcttcgccagcagcatatccatcatcgcgtcagtacgctgatcgtcttcatcatcgatagtcaactgcaccagacgacgagtgttcggatcaagcgtggtttcgcgcaattgcatcgggttcatttcccccagacctttaaaacgctggacgttcggcttgcctttcttgcgttttaattgctcaagtacgccctctttctcttcttccgtcagcgcgtaataaacctctttcccgagatcaatacggtagagcggtggcagtgcgacgtaaacgtgaccgtgtttcaccaacgcgcggaaatgttttacgaacaaagcgcagagcagcgtggcaatgtgcagaccatcagagtccgcatccgcgaggatacagattttgccataacgaagctggctcagatcgtcgctgtcaggatcgataccgatcgctacgctaatatcgtgcacttcctggctagccagcacttcgtcggaagagacttcccaggtgttaaggatcttacctttcagtggcatgatcgcctgatattcgcgatcgcgcgcctgcttggcagatccgcctgcggagtcaccttccacaaggaacagctcggtacggttaaggtcctgcgcggtacaatcagccagtttgccaagcaacgccgggccgctggtcagctttttacgcaccacttttttggccgcacgcatacggcgctgggcgctggaaatcgccatctccgccagcagttcagccgcctgaacgttctggttcagccacaggataaaggcatctttcaccacgccagaaacgaatgccgcgcattgacggctagagagacgctctttcgtctgcccggcaaactgcggatcctgcatttttacactcagcacataggcgcagcgatcccagatatcttccgcgctcagctttacaccgcgcggcagaatattgcggtattcacagaactcacgcatcgcgtccaacaggccctgacgcagaccattaacatgggtaccgccctgcatcgttgggataaggttgacgtagctttcggtcagcagttcaccgccttccggcagccacagtagcgcccagtccacagcttcagtatcaccagcgaaattaccgataaacggtttttccggcagcgtcggcagaccatttaccgcttccgccaggtaatcattcagaccgtcctgatagcaccagcgttgttcggtattgttgatctcatctttaaaagtgatctcaacgccagggcacaataccgctttggctttcagcacatgcgtcaggcgactaacagaaaatcgcgggctgtcaaagaaggtttcatccggccagaagtgcacactggtaccagtattgcgtttaccgcaagtgccgacaacctgtaaatcctgcaccttttcgccattttcaaaggcgatgttataaacctgaccatcgcggcgcacgttaacttctacgcgcttgctcagggcgttaaccacgctaatccccacgccatgcaggccgccagagaactggtaatttttgttagagaatttaccgcctgcatgcagacggcaaagaatcagttcaaccgccggtacaccctcttccgggtgaatatccaccggcatcccgcgcccatcgtcaataacttctaagctctggtcagcatgtaaaataacgtccacgcgttttgcgtgacccgccagtgcttcatccacactgttatcaatgacttcttgccccaaatggttagggcgagtggtatcggtatacatccccggacggcggcgaaccggctcaagcccggtgagtacctcaatggcatcagcgttataagtttgcgtcatggtttaagttagtaattcgagttgatcgtcagagatggtgcagaccaagaaaatcgacgatcgggttgaaataatcttcgaagcccgtgaatgcgtggttgccgccttctatgacagtctggcggcaggaagcgtagtacgccaccgcctggcggtaatccagcacttcatctcccgtctgttgcagcagccagatcaaatccggcgcttccagcgggtcaatctgcatgactttaagatcgtaaatatggcgactctctagcacatattgctgcccggtgtaggggttctcgttctgaccgagatagtccgtcagcagttcaaacgggcgcaccgccgggtttaccaccactgcgggcagcataaaacattgactcaaccaggtggcgtaatatccccccagactgctaccgacaatacccaggctatcaccgccatgttccaggacaatggattccagcagctctgccgcgtcggaaggatacggcggcaactgcggaatgatcatctcaacgtcagggtgatgttccgccagccagttttttaacaagctcgcttttgcagagcgcgggctgctgttgaaaccgtgtaaataaagaagcgtagacatcagtagccttcactagcggtatcaggttggaaacgtgtgtccgccaggcgatgcacctcggtggtcagcgtgccatcagcatgtaactcgagagtacgccagccgggcgcgatggtatccagcgtaaagttggaacagtgcggcttaaactgcacacaggtgctcggcgttgccagcaggcggcgaccattccagtcgagatccagctcctgatgaatatgaccgcacagcaagtatttgacgtgcggaaacttcgccagcacggtatccagttcgcccgcgttacgcagactgtgttgatcgagccaactacaacccgcaggtagcggatgatgatgcagcagcagcaacgtatggcgttctggcgcatcggccagtttacgttccagccactcaagctgaaactcgctcagctcaccgtgcggcacgccaaacacctggctatccagcaacaggatttgccattgctcaccaataaacacgcgcttcgccggggagatacccgcatcctgtaacgcgctgtacatcgcgggctggaaatcgtggttgcccggcagccagacgcagggcgcacgaaaacttgcgatgccttcagcgaaatgctgataggccgcagaggattgatcctgcgctaaatcacctgtcgcgacaatcaggtcgaattcgtgctggtgtggccgaatcgcctccagcaccgcctggtaactctcccaggtgtttacccctaacagggcttcgtgcttttgtgcaaacaggtgagtgtcggtaatttgtaaaatcctgactctggcctcaccagccagaggaagggttaacaggctttccaaatggtgtccttaggtttcacgacgttaataaaccggaatcgccatcgctccatgtgctaaacagtatcgcaaccagtccgctaaaaactgattaatttgatgcttttcgtcgcgttgatgcaactttttattaggataatcataccgcgctttgaagcgaaaaatctgctggctactacacacttcagccaccatcgcgtcatgatacagacgcaccgtcatactcggaaggctccagtaactgatcgcgggcgcagtctgttctattgtcaccagggtagtgtatcgggtgctttccacaatcgtcagccgatattgtgcgtttgccacctgatagcttacagtttcgccgggtgcgtcattgcgcggtaacaaacggcgcaattgactaaagttcatctcgcacaggcgcatcatttcaggaaagtcaggtgtgtaacgcttcatttatgcccactcattttttaacgcttgatgatgcagctgcagccattgcaaagcgatgacgctcgctgcgttgtcgattttcccctcttctacccactggtatgcctgttcccggcttaccacatgaacgcgaatatcttcgttttcatcagccagaccgtgaataccgcttgcggtcgtggcgtccacttcgcccaccataatactgctacgctcactggtgccccccgggcttgccaggaaacttaacaccggtttggtccgtttgactatcagtcccgcctcttcaatcgcttcgcgacgggcaacatcttccacactttcaccctcttcaatcatcccggcaaccatctccagtagccaaggggtttcgctggtgtcgtacgcggcaatccgaatctgctcaatcagcacaacttcatcacgcactgggtcaaagggtagcaagactgcggcgtgaccgcgctcaaaaatttcccgccgcacctcatgactcatttgcccgttgaatagacgatgacgaaatctataaagatctaaactaaaaaagccgcgataaagtgtttctcgtgcaataatttctacatcgtttttgccaaatgtaacgggcaggttgtctggcttaagcattgttaatgtcctggcactaatagtgaattaaatgtgaatttcagcgacgtttgactgccgtttgagcagtcatgtgttaaattgaggcacattaacgccctatggcacgtaacgccaaccttttgcggtagcggcttctgctagaatccgcaataattttacagtttgatcgcgctaaatactgcttcaccacaaggaatgcaaatgaagaaattgctccccattcttatcggcctgagcctttctgggttcagtagcttgagccaggccgagaacctgatgcaagtttatcagcaagcacgccttagtaacccggaattgcgtaagtctgccgccgatcgtgatgctgcctttgaaaaaattaatgaagcgcgcagtccattactgccacagctaggtttaggtgcagattacacctatagcaacggctaccgcgacgcgaacggcatcaactctaacgcgaccagtgcgtccttgcagttaactcaatccatttttgatatgagcaaatggcgtgcgttaacgctgcaggaaaaagcagcagggattcaggacgtcacgtatcagaccgatcagcaaaccttgatcctcaacaccgcgaccgcttatttcaacgtgttgaatgctattgacgttctttcctatacacaggcacaaaaagaagcgatctaccgtcaattagatcaaaccacccaacgttttaacgtgggcctggtagcgatcaccgacgtgcagaacgcccgcgcacagtacgataccgtgctggcgaacgaagtgaccgcacgtaataaccttgataacgcggtagagcagctgcgccagatcaccggtaactactatccggaactggctgcgctgaatgtcgaaaactttaaaaccgacaaaccacagccggttaacgcgctgctgaaagaagccgaaaaacgcaacctgagcctgttacaggcacgcttgagccaggacctggcgcgcgagcaaattcgccaggcgcaggatggtcacttaccgactctggatttaacggcttctaccgggatttctgacacctcttatagcggtagcaaaacccgtggtgccgctggtacccagtatgacgatagcaatatgggccagaacaaagttggcctgagcttcagcctgccgatttatcagggcggaatggttaacagccaggtgaaacaggcacagtacaactttgtcggtgccagcgagcaactggaaagtgcccatcgtagcgtcgtgcagaccgtgcgttcctccttcaacaacattaatgcatctatcagtagcattaacgcctacaaacaagccgtagtttccgctcaaagcagtttagacgcgatggaagcgggctacagcgtcggtacgcgtaccattgttgatgtgttggatgcgaccaccacgttgtacaacgccaagcaagagctggcgaatgcgcgttataactacctgattaatcagctgaatattaagagtgctctgggtacgttgaacgagcaggatctgctggcactgaacaatgcgctgagcaaaccggtttccactaatccggaaaacgttgcaccgcaaacgccggaacagaatgctattgctgatggttatgcgcctgatagcccggcaccagtcgttcagcaaacatccgcacgcactaccaccagtaacggtcataaccctttccgtaactgatgacgacgacggggcttcggccccgtctgaacgtaaggcaacgtaaagatacgggttatctgccgcattcttcccccttcagccttcaatttcgaccagccatcctctattctgatgggtatttaccactggtcccggaagacaaaaatgaaacggacaaaatccatacgccacgcatcgttccgcaaaaactggagcgcacgccatctgacaccagtcgctctcgcggttgccactgtttttatgctggctggctgtgaaaagagtgatgaaacagtgtctctctatcaaaatgctgacgactgtagtgctgcaaacccaggcaaaagcgccgaatgtaccaccgcgtacaacaatgcgctgaaagaagccgaacgtactgcgccgaaatacgccacccgtgaagactgtgttgctgaatttggtgaaggtcagtgccagcaggcaccagcccaggctggcatggcaccagaaaaccaggcgcaggcccagcaatccagcgggagtttctggatgccgctgatggccggttacatgatggggcgtctgatgggcggcggcgcgggatttgcacagcagccgctgttctccagcaaaaacccagccagtccggcttacggtaaatataccgacgcgacgggtaaaaactatggcgcagcccagccaggccgcaccatgaccgtaccgaagacggcaatggcaccaaaaccggcgaccaccactaccgttacccgtggcggttttggtgaatctgttgccaaacaaagcactatgcagcgtagtgcaaccggtacctcttctcgtagtatgggtggctgataccgatggaaagagtcagtattaccgagcgcccggactggcgtgagaaagcccacgaatacggtttcaattttcacaccatgtacggcgagccgtactggtgtgaagatgcttactacaagttgaccctcgcccaggttgaaaagctggaagaagtcaccgccgaactgcaccagatgtgcctgaaagtggtggaaaaagtgatcgccagcgatgagctgatgaccaaattccgcattccaaaacacacctggagttttgtgcgccagagttggctgacgcaccagccaagcctttatagccgtcttgatctggcgtgggatggcactggtgaacctaaacttctggaaaataacgccgatacgccaacgagtctatacgaggcggcgttctttcagtggatctggctggaagatcagcttaacgccggtaacttgccggagggcagcgaccagtttaacagtctgcaagaaaaactgatcgatcgcttcgttgagctgcgtgaacagtatggcttccagttgctgcatctcacctgctgtcgcgacacggtggaagatcgcggaaccattcagtatttgcaggactgcgcaacggaagctgaaattgctactgagttcctctacatcgatgatatcgggttaggtgaaaaaggtcagttcacggatttacaggatcaggtaatttccaacctgttcaaactgtatccgtgggaatttatgttgcgtgagatgttcagtaccaagctggaggatgcaggcgtacgctggctggaaccggcgtggaagagcattatctccaacaaggcacttctaccgctactgtgggagatgttcccgaatcacccgaacctgctgcccgcttattttgcggaagatgatcatccgcaaatggaaaaatatgtggttaaaccgatcttctcccgtgaaggcgcaaacgtgagcatcattgagaacggcaaaaccattgaagcagcggaaggtccgtatggcgaagaagggatgattgttcagcaattccacccgttaccgaaattcggcgacagctatatgctgattggtagctggctggtgaacgatcaacccgccggaattggcattcgtgaagaccgtgcattgatcacccaggatatgtctcggttttatccacatatttttgttgaataagccacgataccggatggcactcgccatccggtaattgttagcctatctgcacgctcagcatactcaggctgcccatttctataccctcaaccggaatggtaattggctcctgcccatcccacgcacctaacacatacaacaacggcaaataatgctctggcgttgggttgcttaacgtgccaccttcatggtcgaggtaattcaccagaggatgttgttccactggcccttgccacgtcagattcgctttcacatactcattaaagctcgtcgcccacggatacggactactatcaccgtgccacttcactgtgcgcaggttatgcaccacgttaccgctggcgaccaacattattccttcatctcgcagcgctgccagtttgcgccccatttcgaaatgccaggcggcaggtttgctactgtcgatactcaactgcaccatcgggatatcagcgtcaggatacatcttaatcagcacgccccagctgccgtggtcaaagccccaggcttctttatccagcgtcaccgggatcggcgctaacagctcaaccagacgctgtgccagcgcagggctacccggagcaggataatgcgtatcgtacagcgcctgcgggaagccaccaaagtcatgaatcgtgggcggcgtctccatcgcggtcactcctgttccacgggtaaaccagtgagcgctaaccaccacaatcgcttgcgggcgtggcaatgtcatccccaacttctgccagctgcgggtatacaaattatcttccagcacgttcatcggactaccgtgacctaaaaacaatgctggcatacgtgtactagacatgatgatatccttaactaaaggtgtcattttgatatcctcacaatacgcttgttcggcggagtaagaacccggataacaatgatgatgatcatcagttattttgacgatctgcctgaaggtgaagatttataaggagttgtcgatgagtgtacctctcattctgaccatactggcgggggcagccacgtttattggcgcgtttctcggcgttctcgggcaaaaacccagcaaccgcttactggcgtttagcctaggttttgcggcggggatcatgttgctcatcagtttaatggaaatgcttcctgccgcactagcagctgaaggaatgagccctgtgttgggttatggaatgtttatcttcggtctgcttggctattttggcctggaccgcatgttgccacatgctcatccgcaggatttaatgcaaaaaagcgtgcagccgttgccaaaaagcatcaagcgcacagccattctgctcactctcggcatcagtctgcataacttcccggaagggattgccacctttgtcacggcgagcagcaacctggagctgggatttggcatcgcactggccgtcgcgttgcacaatatccctgaaggtctggcagtggcaggcccggtttatgcggcaacggggtctaaacgcaccgcgattctgtgggcggggatttctggactagcagaaattcttggtggtgtgctggcgtggttaatcctcggtagcatgatttccccggtggtcatggcggcaatcatggcggcggttgcaggaattatggtggcgctcagcgttgatgaattaatgccgctcgccaaagagattgaccctaataataaccccagctatggcgtactatgtggaatgagtgtgatgggattcagtttagtgctgctacaaacggcgggaattggttaaaaacaacatcagaagttgtccagcgcatggacaacttctgccagcttcacgaaagccttattctaccttttcggctgtctcttctctcgtactgtttaagtatttgttccgcgcttcaagcagtgcgtctctgtcctggcgaaacgcccgacaataacgtttcaaatgcaggaaataacccaccacaaccagagcaatcaatacaatccagtaccaggcgataaacatccttttacccttaatatttaacaatactaaacatttagcgtataaatttcacatatcctttttcggatatattcatatggtcgcataataacggaacaattatatgattttgatcataatgaaaaagaatgcctgatattaatgaaattttctcatagaaagagaagcggaattaacatcttgcatagcagggaaaaataaaaaccgaagcctgctacaacttcggtttcttgattaaggcagtaaattaagcagcggttttcagctggctttacgctcatgtgcctgacggtatgccaccaggtcttcaatagtcacgagcgccatattgtgtttattggcaaactcaatacactctggtgcacgcgccatcgtgccatcgtcattagtcagctcacacagtacaccagccggtttaaagcctgccagcgtcatcagatcaatagttgcttcagtatgaccgccacgcgtcagtacaccacctgcctgagcgcgaagtgggaaaacgtggccaggacgattcagatcactcggttttgcgccatcggcaatcgctgcgcgaacggtcgtaatacggtcagcggcagaaacaccggtagtcacaccttcagctgcttcaatggtcacggtaaaaccggtgccataggcgctggtgttattttctaccatcattggcagatcgagttgtttacggcgatcttcagtaatgcacaggcaaacaataccgctaccgtggcgaatggtcagcgccatctgctcaacagtcatggtttctgccgggaagatcatatcaccttcgttttcacggtcttcatcatcaagcaccattacaccgcgtccttcacgcagcgcagccagtgcattttcaacacgttcgaaaggcgtaccaaaagaggaaagtagcgtctgattcatggtaaaaaaacctcactaaaattatggttaccagaatcagggcagtcttaggagtggcggcatatagccaaaataacgtgagcgggtccatgcccgacagaatcgttactctctcccatccggactctaaccgtcggccccggaattacaccggatctgctgtcctttgagttcgcacccaaagcgctcgcgggctttcaactgagttgatttaccgccggtggggaatttcgccccgccctgagaataagcggattcactataacgctaatgattagcggcagcaacgcatagcttcacataattctggtttatatctaatacaaacactaaaacgggccatcaggcccgttatatcagtgctctaactccagctctcttgcctgcatcatctgttgacaataccaggcataacgtgcgcaaaaccaggttctatgttcttcatccatgttaccagtaacggccagaatatcgaccgggcgaccttctgcgtgcattctggcaaaactacgcgccaggaaatcgaaattatttaaagaattaagactatgatccataagcacatcctccggttatcgcataccttttaaggccatatgctttttctgatttcagtattccccaatcagtgtagtgcctttaaacataacgtgcgtaaatatattgtccccgatcacactttttagtgaaaaataaaaaaccatattaaaagactttctcttccagaacttctctaacctgtgttattattaacacagataaatgtaagcaaggaaactattacaaagtaaatattgcgtcactaaatggacattggagtgatatatgattttattcgccgactataacaccccttatcttttcgctatttcctttgtactgttgatcggcctgttagaaatttttgcgcttatctgcggtcacatgctctccggtgctcttgatgcacatcttgaccattatgattctataaccacaggtcatattagccaggcacttcattatctcaatattggaagattgccagctctcgtcgttctctgcttactggctggtttttttggtcttattggcatcctgttgcagcatgcctgcatcatggtctggcaaagtccactgagcaacctgttcgtggttcctgtcagtttactgtttacgattattgcggtgcattataccggtaaaatagttgcgccctggattccacgcgaccatagtagtgctattacagaagaagaatatattggtagcatggcgttaattaccggtcatcaagccactagtggtaatccctgcgaaggaaaactcaccgatcaatttggccaaatacattatttactactggagcctgaagaaggaaaaattttcactaaaggagacaaagtgttaattatttgccgactttctgcaacgcgatatttggcggaaaataatccctggccccaaatattgtaatttattaatcaaaaggaaatttaataatggatgatattgttaattctgtgccctcctggatgtttaccgcaattattgccgtatgcattctgtttattattggaattattttcgccaggctctatcgtcgcgctagcgcagagcaagcttttgttcgtactggtttaggtgggcaaaaagtggtaatgagcggtggcgcaatcgtgatgccgatctttcatgaaataatccccatcaatatgaatactctgaagctggaagtcagccgcagtaccattgatagcctgattacgaaagatcgtatgcgcgtcgatgtagtagtcgctttctttgtgcgggtaaaacctagtgtagaagggattgccaccgctgcccagacgctggggcaacgcaccctgagccctgaagacttacgtatgttggttgaagataaatttgtcgatgccctccgtgcaacagctgcgcaaatgaccatgcatgagttacaggatacccgcgagaactttgtgcagggggtgcaaaatacagtggcagaagacctgagcaaaaacggtctggaactggagagcgttagtcttaccaactttaaccagaccagcaaagaacatttcaatccgaacaatgcctttgacgccgaaggtttaaccaaactgactcaggaaacagagcgccgtcgccgcgaacgtaacgaagttgaacaggatgtagaagttgcggtgcgtgaaaaaaatcgcgatgcgctaagccgcaagctggagattgaacagcaagaagcgtttatgacgcttgagcaggagcagcaggttaaaacccgtactgccgaacagaatgcacgtattgcggcttttgaagctgaacgtcgtcgtgaagcagagcagacacgaattctggctgaacgacagattcaggaaacagaaatcgaccgcgaacaggccgtccgcagtagaaaggttgaagctgaacgtgaagttcgcattaaagagatcgaacagcagcaggtcaccgaaatcgctaaccagacgaaaagcatcgctattgccgccaaaagcgaacaacagtcccaggcagaagcgcgtgctaatctcgcacttgcagaagcggtaagcgcccaacaaaacgtagaaaccactcgccagactgccgaagccgatcgtgctaaacaagttgccctaatcgctgccgcgcaggatgcagaaaccaaagcggttgaactgaccgtgcgggcgaaagcagaaaaagaagccgcagagatgcaggcggcggctatcgttgagttagccgaagctacacgtaaaaagggtctggcggaagcagaagcacaacgtgcgctgaacgatgctatcaacgtactttctgatgaacaaaccagccttaaattcaaactggccttgttgcaggcgctgcctgcggtaatagagaaatccgttgagccgatgaagagtatcgacggtatcaagattattcaggtcgatggtctgaatcgtggcggcgctgcgggtgatgcaaacacgggtaatgtggggggcggaaacctggcggaacaagcattaagtgccgctctctcttaccgcacacaggcaccgctgattgactccttgctcaatgaaattggcgttagtggcggcagtctggcggcattgactagtcccttaaccagtacaactcccgtcgaagaaaaagcagagtaaaccctcttccaggaataatccctggcccaaaaagccggggattttttatatctgcgttccgctaaaaagtgcaaatgatcaggttgttgcagcattttgcgtgacggctcggggaaggcaaaactgcatcagagaaagcattgcgtggggtctggcgctcatcaacaatcggggagtcagcagggggctgaaacgggaaagcccctcccgaagaagggggccttacagaaggaaagggttatgatgaagctcgtcatcatactgattgtgttgttactcgtaagtttcgcagcttattaacagccaatcagaggggggagaaatcctccctcacccttgttcctttactttaggttgaaaaaaaatcagcgtcaagaaggtttcattaacacatatccctggcccaaaaagccggggattttttatatctgcgttccgctaaaaggtgcaaatgctcaggacgttgcagcgttttgcgtgaccgctcggggaaggcaaaattgcctctgggaaagcattgcgcggggtccggcgctcatcaacaatcggggggcagcaaggggctgaaacgggaaagcccctcccgaagaaggggccttgtataaggaaagggttatgatgaagctcgtcatcatactggttgtgttgttactgttaagtttcccgacttactaacaactcatcagaggggggagaaatcctcccttacccttgttcctttactctaggttgaaaaaacaacagcgtcaataggcctgccatgtacgaagcgagatctgtgaaccgctttccggttagccttttttatcctgttggatcttcttgatgatgttggtcgtgctgcaaccgtcttcaaagttgagcaccaacacttcgccaccgttggcccagacttctttactcccggcaatctcttctggtttatagtcgccgcctttcaccagcagatctggcaagatcccggcgatcaagcgctgcggcgtgtcctcttcaaagctcactacccagtcgaccgcttccagtgcgcccagcacaatcatacgctgttcgagtgggtttaccgggcgggaatcccctttcagccgtttggtggaggcatcgctgttgacggcaacaatcaagcggtcacccagcttgcgggcatttgccagataagagacgtgcccggcgtgcaggatgtcaaagacaccgttggtcatcaccactttttcaccacgtttacgcgctgccgctacggccagcttcagttcctcttcggtcatcacgccaaagcctgtatctgcacgtccacgtacagcattttccagctcgatcgggctaaccgtggaggttcccagtttgccgaccaccacgccagccgccgcattggcaaagaagcaggcttcttccaggctattacccgctgccagcgttgccgccaggacgccaatcaccgtgtcgcccgcaccggtaacgtcatacacttcctgcgcttgggttggcatatgcagcggcgctttacccggttgcagcaggctcataccctgttcggaacgggtcactaacagagcgctgagttcgtaatcggcaatcagtttcatgccgcgctcaacaatctcttcttcggtcttacatttaccgacaacagcttcaaattcgctgagattcggcgttaacagcgtagcgccgcggtagcgctcaaaatcggtaccttttggatcaatcagcaccggaacacccgctttacgcgccagttggatcatctgctgtacgcttgccagcgcacctttggcgtagtcagaaagcaccagcgcgccaatgctactcagcgcctgattaatccgctcgtgcagcggctgcggatcaacaccttcgaaaccttcttcaaaatccagacggatcagctgttggttgcgggaaagtacccgtaatttggtaatggtcggatgcgtcggtacagaaacgaagtcgcatttgacgttgacgtcggccagagatttactcagcgcgcgcgctgcatcgtcaatgcccgtcaacccgaccaggcgtgcattagcaccgagagaagcgatattcatcgccacgttagccgcgccgcccggacgttcttcgatggtattcactttaaccacgggcaccggcgcttccgggctgatacgactggtggggccgtaccagtaacgatccagcatcacatcaccaaccaccatcactcctgcacgttcaaactctggcagcgttactttcattcctgtctcctgagagattcaaaatttgcgcgcgataataccatacttcattcttccaccagccacttctgccagcttgcccgcaccagttcacgctctgcggtgaagcaatcctcgctcacatggcccggcaattcctgtaatgccagatgatgaagttcatcgcgaagcgtagtgtaagcacgggtcagcgccatcgcttcctgctcttccataatgtcgttttgcgccagtagttccagaatacgcacgttgtcactccagcgcgttaacttcggtttttcatgagcgtagcgcaacaccagatattgggtaataaattcgatatcggtaattcccccttcatcagctttgatatcaaagcgatcgcgatgtttattgccgagatgagcgcgcattttctcgcgcatttcccgcacttccgtttgcagagttttaccttcacgcggcagcgtcataatctcgcgacgcactgcgtcaaagtgcgcggtgagctgcggatcgccgtacactacacgcgcacgcaccagcgcctgatgttcccacgtccaggcctcgtttttctgataatcggcaaatgcttctgcggatgtcaccagcattcccgccgccccggacggacgcagtcgagcatccacttcatacaaaatgccggaagaggtacgcgtactgaacagatgcataatgcgttgcgccagacgcagataaaactgccgcccgtcgatttcccgctcaccgtcagtcatcgcatccattgggcaatcatggaggaagataaggtcaagatcggaactgtagcctaactcccagccgcccagcttgccgtagccgaccaccgcaaaaccacgcccttcgcgttcgttcaggtgattcggcttaccgtagcgggcaaccatttgaacccacgcctgctgaacgacggcatctatcatggcttccgccagccaggttaagtgatcgctcactttcatcaccggtagcgtaccggcgatatccgctgcggcgatgcgtaacagctgcgcctgtttgaactgacgcagcgcctcaagctgttgctcttcgtcatcttccggcacgcgcagcaaatactggcgcaactcatcgcggtaggcatcggtcgccgtcggctggtaaagggtgtttggatcgagcaattcatccagcaataatggataacgcgccagctggctggcaatcatcgggctcgcggcacacagagaaatcaaatgtttaagcgccgcggggaattcactgagcaattctaaataggtggtgcgggtaacaatccccaccagcaaggcggtaatgcggctcagcgtaacggcagcgtcttcacgcgcacagacatcacttagcagatgcggcatcagatggtcgagcacctgacgtcctcgcggcccgatggtgcgcttatccagctctttgcggaaatcggcaatcagcgttagcacctgtttgcgatcatcctcgctaagatgcgccagcactggcgtagtgtcatcttcctgcaacgcatcctgccacagctcacgccactgttcgctcaggctctcttcctgagtttcactttcatcgtcgccaatcaattcattaaacacccggcgcacattggtcatatgtgcggtcagcgccccggtcagttgcggccagtcagcaaagtccatcgcccacgccagccgcgcacgattaagctcatcagaaggaagcgtctgggtttgttcgtcgttaatgctttgcagcaggttttccagacgccgcaggaacagatacgccactcgcaattgttcagcatcgttttcagaaagcagatgcagctcggcaatggcgctgagcgttggcagtaaagagcggctttgcaggctcggttcgcgtccgccgcgaatgagctggaacacctgaacgataaattcaatttcgcgaatgccgcctgcgccgagtttgatattgtcggtcaaaccacgtcgacgcacttcacgggcaatcatccctttcatgttgcgcaggctctgaatcacgctgaaatcgatgtaacgacggaaaacaaacgggcgcagcatcgcacgcaactcgttagcatagacgccttcgctatcgcccataatccgcgccttgaccatcgcgtaacgctcccagtcgcgcccctgctcctggtaataatcttccaacgcggcaaagctcagcaccagcgggccactttcgccaaacggacgcagccgcatatccacgcgatagacgaagccatcctgcgttggttgatccagcactttaatcagccgctgccccatgcgggtaaaaaactgcgcgttatccagttcccggcgtccaccctgcgtacaaccatgttccggccaggcaaaaatcagatcgatatcagaggagaaattcagctccccaccgcccagcttacccatgcctaaaatcagcagcggttgcgcttcgccctgcgcattgcacggcgttccccactcgcggcagcaggcgtcatacagccagtcacgcgccgcaacaatcagcgtctccgccagatagctgagctgctgcaatatgctctcttcagtaaccagtgccagcgtttgcgcccaggcgatgcgcaccataatgcgccgccggaatagccgcagctcgcgcattaacccggcttcgtcactcacattacagagcgcctcctgcaaccatgccgcgtaatgctgccattcgtcggcctgcggcggttggctttccagttccgtcagccactctggatgcgcaatcacgctgtcctgcacaaaatcactaaaagtaagtacactcttcgcctgtgcgctaagactttcctcggctaaaggctctggcagccgctcaacaacggtctgccagtactgctgtaacggactagagagcggcttcataagcgattttatccttgcctgattaacgttttccgctgtgcaaccagaacggttcctgattgtttgcctcattacggaaatgttcaatttcgatgcgttgcccggtcgcaatagcgtgatgcagcccctgccagttctccagccaggcttgcgcgacgacaggatcatagtaacccgccagcaacagtatactgtcaatatcacgcgtcaggcgtggcaactggtcacggtagcgatcgcctaacggctggcagaaaacgcttttcagttcagcggcatggcgggaaagatggatatcggcaaagcgtttgaaggagtcgctgattttgccctgcgctttggcatctaaaaatggctgccatgctttgcttaccaaccattcggtcaacgccagcttcgccattgccgtttcggtagagtagaccgccgtcacggcagacaccgcagaagcaatggtcgcctcgcattgagtcagcagatcacgtaagtgagtgctcgctttacgcggcacaataccaccgaacagcatcagcgtatgacggaccaggctaatggctgccagcacctgttctttcgccgcatcgttgccgcgtacccacagttcttcatgatactgccattgcgctaacgccagctcgagcgccgcttccagcccctgttccacatcggcttttgccgcaacatgcaaaatggtggtcggtttgatttcacgcgccggattgccctgcgccagatgatagccacgcgccgctttgctcaggctgccctggcgtaatccggtttggcttaccagttggttcgccagtttcagcaccgcgcgcgtgtcgccgctaagcagttccagttccagctcacagataggttcagcaaattcacccgctttcacttccccctggtcgagggcgatttcaatttggctaccatcgaccgccaccagccatttttcgcgataaaaatcggtgctgaacagcggctgcacgcgggaggcgagatcggcgggcaattcgccgttcggccagacttccgtcggtaactgcgccaggtcgagcgtcggttcgctcaacgccacgttatattccgggcgctgatgtaagccgcctgtcactcttcctgcaactttcatggtcatctcatagcgaccgttttcgccacgaatacgtaagcccatatcgtgcccacgcagccagttatccggcgtttcgtagtaaatattcagcaactgcacggggtcatggtgctcgccgcccagcgtattgagatggtcacgcaacgcctcaacggcactgtgattaacaataaactttaattcgatttcctgagccatggcctttacttatcggttatgtcacataagtgacgatgaacggcgaacttaatgcgatcttttttgtcagtagatagtattttgcgccaaattgccatgcaacgggcaatttgacgggcgtaaaagtttgaagcagtggcaagacctgacacagaggattccgattgatgtcgaatgctttgcgtagcgacactgatgccactactatcgttccactttccatgacaataacgacagcctgatgccaaaattacgcctgatcggattaactttactcgcacttagcgcgactgccgtcagtcacgctgaagaaacgcgctatgtttccgacgaactgaatacctgggtccgcagcggtccgggagatcattatcgcctcgtgggcacggttaacgccggcgaggaagtgaccttattacaaactgacgccaacaccaattatgcccaggtgaaagacagctctggccgtaccgcctggatcccgttgaaacaacttagcactgagccaagcctgcgctcccgtgtgccagatctggaaaatcaggtcaaaaccctgaccgataaactcaccaatatcgataacacctggaatcagcgcaccgcagaaatgcagcaaaaagtggcgcagagcgacagcgtgatcaacgggttaaaagaagaaaatcagaaactgaaaaacgagctgattgtcgcgcagaaaaaggtcgatgccgccagcgtacagctggatgacaaacagcgcaccatcatcatgcaatggtttatgtatggcggtggcgtgctggggcttggcttgctgctcggtctggtactgccgcacctgatcccaagccgcaaacgcaaagatcgctggatgaactaaatcgccttcttcgttgcactgtcttattattaggaattgtgtatttgacgaagggatgatggcgtgaagatttatctggtcggtggtgctgttcgggatgcattgttagggctaccggtcaaagacagagattgggtggtggtcggcagtacgccacaggagatgctcgacgcgggctaccagcaggtaggccgcgattttcctgtgtttctgcatccgcaaacgcatgaagagtatgcgctggcacgtaccgaacggaaatccggttccggttacaccggttttacttgctatgccgcaccggatgtcacgctggaagatgatcttaagcgtcgcgatctgaccattaatgcgctggcccaggacgataacggcgagattatcgacccgtacaacggtctgggcgatctgcaaaatcgtctgttgcgccatgtttcccccgcttttggcgaagatccgttacgcgtattgcgcgtggcgcgttttgctgcgcgttatgcccacctcggttttcgtattgccgatgaaactctggcgttgatgcgcgagatgacccatgcgggtgaactggaacacctgacgcctgaacgggtatggaaagagacggaaagcgccctcaccacccgcaatccacaggtgttcttccaggtactgcgcgattgcggcgcactgcgcgttttattcccggaaattgacgcactgtttggcgttccggcccctgccaagtggcatccggaaatcgatacgggtattcataccttaatgacgctcagtatggcggcgatgctgagtccgcaggtcgatgtccgtttcgcaactttatgccacgatctcggtaaagggctgacgccgccagaactctggccgcgtcatcatggtcatggcccggcgggtgttaagttagtggaacaactatgccagcgtctgcgcgtgccaaatgaaattcgcgatttagccagactggtggctgagtttcacgatctcatccacaccttcccaatgctgaacccaaaaaccatcgtcaaattatttgattccatcgatgcctggcgtaaaccgcagcgtgtcgagcaactggcgctgaccagcgaggctgacgtgcgcggcagaaccggttttgaaagtgcggactacccgcaaggccgctggttgcgcgaagcctgggaagtggcgcagagtgtgccgacaaaagccgtcgttgaagcgggatttaaaggtgtggagattcgcgaggagctgacccgacggcggattgcggcggtagccagctggaaggaacaacgttgcccaaagcctgaatgagtattgggcattttgccggatgcggcgtaaacgccttatccggctacatgtcaacgacagttgtaggcctgataagacgcgcaagcgtcgcatcaggcgttgattgccggatgcggcgtgaacgccttattcggcctacgcaatcgttgacaacgccaagcatccgacactattcctcaattaaaagaacacgacatacaccgcagccgccacaataaagcgataaatggcgaacgggataaagctaatgcgcttaatcaattgcaggaaggttttaatcgctatcagcgccaccacaaaagcggtgataaacccaacggcaaacatcgggatatcgccgcttgtcaggaagccccagcttttgtagagatcgagcgccgttgcgcccatcatcatcggcaccgccagcaggaagctaaactcggaagcagcgtaacggctcacccccatcagcatcccaccactaatggtcgccccggaacgggagaaacccggccacagcgccagacactggaaacagccaatcataaatgcctgacgataggtcatatcatcaagacccggcgcacgcggctctttcggcttcaggcattcggcggcaatcagcaacaaaccgccaacgaccagcgcatacatcacatttatcgggttaaacaaactcttaatcgtgtcgtggaacaacagccccaataccaccgccggaatcatccccagcaaaatgtggatcagcgttaaacgacctttgctttcaccttcgtgctgcaacgggcggccaaagtggatgccaatcaggccaaacagacgccgccagaacatcactactaccgccagaatacttcctaactggatcacaacttcaaaggttttcgccgtgtcgccctcaaaccccaacaagtgaccgacaataatcatatggcccgtgctggataccggcagaaattctgtcaatccttcgaccacacccaatattgccgctatcagcaggctgtgcatatcgctcatcaataaacccctaaattattaaaatgtaccgcttgtccgaactactgcgtatgaccaggttataaccgtttggtttaacagctgtaaaattaattattttctttcagattattgccacgctcaatgattacgccaacattcgccgcccgcgccactgcgcctggcttgctgagtttgatacgcacccacgggctgttgaagcgtgctaacagcagctccgccacctcttcagccacgcgttccaccagcgcaaaacgcgccccctcgacgtggctgaccaccgtttctgcaatgtcagcgtaactgaggcaatccgccacatcatcacttttcgccgctttacggttatcccacgccatttcgatatcgaacactaacttctgttcgatggtctgttcccagtcgtaaacaccaatagtggtgattacgctaagttgctctataaatacaatatccatcacgtcctgcctgctttttggctaaccggataccacttccggcgaaatgtgcgtattatccacagattcatcgttgaacacgaattttcaaaacggaacagcttatgagtgcaatcgcgcctggaatgatcctcatcgcgtacctctgcggctccatttccagtgccattctggtttgccgcttgtgtgggctgcccgatccgcgaaccagcggctccggcaatccaggcgcaaccaatgtgttacgtatcggtggcaagggagcagccgtagcagtactgattttcgacgttctgaaaggaatgttgcccgtctggggcgcgtatgaattaggtgtcagccccttctggctaggcttaattgccatcgccgcctgtcttggacacatctggcccgttttcttcggatttaaaggaggaaaaggcgttgctaccgcttttggtgccatcgcacccattggctgggatctcaccggagtaatggcgggaacctggttactgaccgtgctattgagcggatacagcagcctgggagcgattgtcagtgcactgattgctccgttttatgtctggtggtttaagccacaattcaccttcccggttagcatgctctcttgcctgatcctgctgcgtcatcatgacaacatccaacgtctgtggcgtcgtcaggagacaaaaatctggacgaaattcaaaagaaagcgcgaaaaggatcccgagtgatttctggtggatttacatgacctgatagccttcatcgggcttgcccagccgttgctggcaccatgccgccagaaattccacgcagacacgtaatttcatgctgcgatagagcggctcccggtaaacagcccagatattggcgctttgtgcatactctggcaatacttgcaccagtttgccactctccagaaacggcaacacatcccactcggaacgcagcataatccctttaccctccagcgcccattgcagcacaatctcgccgctattggaggaaagatgcccgcttaccttcacgctttttttctcctgaccgttccccaactcccatattccatgggtcatatcgcgctctttggtcaccagacagtcatgacgacttaattcctgtagggattgtggctgcggatatttttgcagatactcaggtgctgcgcataatattcttttattttttgtcaaaagatgcgcaatataataatcaggaatttcgtcattaatacgaatatccagatcaatattatcctgcactaaatcaatttgccgatcgaacaattcaaaatgcacctgtaactcaggataattgcgcatcagttcggtaatagctggcgcaatatggctgcgcccaaaaccaaaactgcaaccaatacgaatcatcccctccgggcgcgttttgatttgcgtgacgtcatcgaccagtcgctgatattgggtgaggatttccaacgcatgttcgtaacaacgttggccactttcagtcagcgccacgccgcgagcggagcggttcagcagcgttgttgccagcgtattttcaaggatttggatccgcttggtgacaaatgcaggcgtctgcccaagcgtcgccgctgcggcgctaaaactcccgctgtgaacgatttctaccagtacctgcaagtctttggctaaaggccagctattcagcatcgttaattatccgcagttgtgataagcgcagtgtatttcgcaaaacattgccattccctgctctggcgcaatattcattcttattttcgcgttgattcacgaactgttaattacatattcacggtggcaaaaaatataaaaccacatttttagtggtagtttgtggcggtgaatttttccagacaaatacaaaaactggagttgccatgatgagcgaaagtaataagcaacaggcagtgaataagttgacagagattgtcgctaactttaccgccatgatttctacccgaatgcctgatgacgtggtggataaactaaaacagctaaaggatgccgaaacgagcagcatggggaaaattatctaccatacgatgttcgacaacatgcaaaaagcgattgacctgaatcgtcctgcctgtcaggacaccggggagattatgttcttcgttaaagtcggttcccgcttcccactgcttggcgagctgcaaagcatactcaaacaagccgtggaagaggcaaccgtcaaagcgccactacgtcacaatgcggtagaaatttttgacgaagtaaacaccggcaaaaataccggtagcggcgtaccgtgggtcacctgggacatcatccccgacaatgacgatgcggaaatcgaagtttacatggcaggcggcggctgcacgctacctggccgcagcaaagtgttaatgccgagtgaaggctacgaaggcgtggtgaaattcgtcttcgaaaatatctccaccctcgccgtaaacgcctgtccaccggtactggtgggcgtgggcatcgccaccagcgtggaaaccgccgccgtactcagccgtaaagccattttgcgcccgattggcagccgccatcccaatccaaaagcggcagaactggagctacgcctggaagaaggactcaaccgtctggggattggtccacaagggctgaccggcaacagtagtgtgatgggcgtacatatcgaatctgccgcccgccatccgagtaccatcggcgttgctgtctctaccggctgctgggcgcatcgtcgcggcacgctgctggttcatgccgatctcacctttgaaaatctgtctcacacccggagcgcgttatgaaaaagatcctgacaaccccgatcaaagctgaagatctgcaagatattcgcgtcggcgatgtgatctacctgaccggtacgctggtgacctgccgcgacgtttgtcaccgccgtttgatcgaactgaaacgtccgatcccttacgatctcaacggcaaagcgattttccacgctggccccatcgtgcgcaaaaacggcgacaaatgggagatggtctccgtcggcccgacaaccagtatgcgtatggaaagttttgaacgtgaatttattgagcagaccggcgtgaaactggtggttggcaaaggtggtatggggccgctgaccgaagaaggctgccagaaattcaaggcgctacatgtgattttcccggcaggctgcgcggtgctggcggcaacccaggtggaagagattgaagaagtgcactggacagagctcggaatgccggagagtctgtgggtctgccgggtcaaagagttcggcccgctgattgtctctattgatacccacggcaacaacctgatagccgaaaacaaaaagctgttcgccgaacgccgcgatcccatcgtggaagagatctgcgagcacgtccattacatcaaataaccctcccggagaggctcacccctctcctttttcgcaggcataacacgatgaaaccttccactgaatggtggcgatatcttgcgccgctggcggtcatcgccattattgctctacttccggttcccgcagggctggagaaccatacctggctctactttgccgtttttactggcgtgatcgttggactgatcctcgaacccgtgccgggtgccgtggtggcgatggtgggtatatccatcatcgccatactctctccctggctgctgttcagcccggagcagctcgctcagccaggctttaaattcactgcaaaatccctcagctgggccgtttccggtttttctaatagcgttatctggctgattttcgccgcctttatgtttggcacaggctatgaaaaaaccgggcttggacgccgcattgcgctgattctggtgaaaaagatgggacatcgcacgctgtttctcggctatgcggtgatgttctccgagctgatcctcgcacctgtaacaccgtccaacagcgcgcgtggtgcggggattatctatcccatcatccgtaacctgccaccgctctatcaaagtcaaccaaacgacagcagtagccgcagcattggcagctacatcatgtggatggggattgttgccgactgcgtgaccagcgccattttcttgacggcgatggcaccaaacttgctgttaattggactgatgaaaagcgcatctcacgccacgctgagttggggcgactggttcctcgggatgttgccgctcagcattttactggttctgctggttccctggctggcttacgtgctgtacccgccggtactgaagtctggcgatcaggtgccgcgctgggcagagacggaactgcaggcaatgggcccgctctgtagccgtgaaaaacggatgctggggctgatggtaggcgcgctggtgctgtggattttcggcggtgattatatcgatgccgcgatggtcggttacagcgtggtggcactgatgctgcttctgcgcattatcagttgggacgacattgtcagtaataaagcggcgtggaacgttttcttctggctggccagccttatcaccctcgccaccggactcaacaacaccggttttattagctggtttggcaaactgttagcaggcagcttaagcggttatagcccaacgatggtgatggtggcgttgattgtggtgttttatctactgcgctactttttcgccagcgccacggcgtatacctccgctctcgcaccgatgatgattgctgctgcgctggcgatgccggaaatcccgctgccggtgttctgcctgatggttggtgcggcaattggtctggggagcattcttacaccatacgccaccggccccagtccgatttactacggcagtggttatctgccaacggcggattactggcgactgggggcgatttttgggctgatattcctcgtattgctggtgattaccggcttactgtggatgcccgtggtgttgctttaagtgaggacggtgccggaaattgctctccggcacccaatagttttacgcagccggtaactccgccagcggccagcgcggacgcacgctaacgccgagatccgccgtcgcgcctgctttaaaccgcaccattccggcataggcgatcatcgcgccgttatcagtacaaaattccggacgcgcgtagaacacttcgccgcggcgttttttcatcatttcagccagcttcgcccgtaacgtacggttagcactcacgccgcccgccatgaccagtcgcttaaagcccgtctgacccagcgcccgcttgcacttaatcatcagcgtatcgaccaccgcatcttcaaaggcgcgggcgatatcagcacgcgtctggtcgtcggtgccgttgtcacgaatggtatttgccgcgaaggttttcaggccggagaagctgaaatccagccccggacggtcggtcatcggacgcgggaagacaaagcgcccggcagtaccctgagccgccattttgctcagtaacggcccgccaggataatccagccccagcagcttcgcggttttatcaaacgcttccccggcggcatcatcgatagactcgccgagcagctcgtactgaccaatgccagtcacgctgattaactgcgtatgaccgccggaaacaagcagcgcaacaaacggaaattccggcgggttatcttccagcatcggcgctaacagatgcccttccatatggtgtacagggatcgccggaacgtcccaggcaaacgccagagaacgccccacggtcgcgccaaccagtagcgcgccgactaatccagggcctgcggtataggccacagcatcaatgtcttttgccgttaaaccagactcctttagcgccgcctggatcaacggtacggttttacgcacatgatcgcgggaggccagttcaggcacgacgccgccgtagtcagcgtgcaatttcacctgactatacaattggttggctaacaaacctttttcatcgtcgtaaatggcgatgccggtttcatcgcaggaagtttcaatacccagtacacgcatgacttgttttacctcgctttattaccgcgcagtgtaggaccaatgcgggttgatgtaaaactttgttcgcccctggagaaagcctcgtgtatactcctcacccttataaaagtccctttcaaaaaaggccgcggtgctttacaaagcagcagcaattgcagtaaaattccgcaccattttgaaataagctggcgttgatgccagcggcaaaccgaattaatcaaaggtgagaggcacatgccggtaattaaagtacgtgaaaacgagccgttcgacgtagctctgcgtcgcttcaagcgttcctgcgaaaaagcaggtgttctggcggaagttcgtcgtcgtgagttctatgaaaaaccgactaccgaacgtaagcgcgctaaagcttctgcagtgaaacgtcacgcgaagaaactggctcgcgaaaacgcacgccgcactcgtctgtactaattccccgagagcgttgctctccgatcagaccgagttgtagttgtaaggccgtgcttccgaaaggaatgcgcggcttattttcgtttatgaattgctaaaaatcggggcctatggctggacgaatcccacgcgtattcattaatgatctgctggcacgcactgacatcgtcgatctgatcgatgcccgtgtgaagctgaaaaagcagggcaagaatttccacgcgtgttgtccattccacaacgagaaaaccccgtccttcaccgttaacggtgagaaacagttttaccactgctttggatgtggcgcgcacggcaacgcgatcgacttcctgatgaactacgacaagctcgagttcgtcgaaacggtcgaagagctggcagcaatgcacaatcttgaagtgccatttgaagcaggcagcggccccagccagatcgagcgccatcagaggcaaacgctttatcagttgatggacggtctgaatacgttttaccaacaatctttacaacaacctgttgccacgtctgcgcgccagtatctggaaaaacgcggattaagccacgaggttatcgctcgctttgcgattggttttgcgccccccggctgggacaacgtcctgaagcggtttggcggcaatccagaaaatcgccagagtttgattgatgcggggatgttggtcactaacgatcagggacgcagttacgatcgtttccgcgagcgggtgatgttccccattcgcgataaacgcggtcgggtgattggttttggcgggcgcgtgctgggcaacgatacccccaaatacctgaacagcccggaaacagacattttccataaaggccgccagctttacggtctttatgaagcgcagcaggataacgctgaacccaatcgtctgcttgtggtcgaaggctatatggacgtggtggcgctggcgcaatacggcattaattacgccgttgcgagcttaggtacgagtaccaccgccgatcacatacaactgttgttccgcgcgaccaacaatgtcatttgctgttatgacggcgaccgtgcaggccgcgatgccgcctggcgagcgctggaaacggcgctgccttacatgacagacggccgtcagctacgctttatgtttttgcctgatggcgaagaccctgacacgctagtacgaaaagaaggtaaagaagcgtttgaagcgcggatggagcaggcgatgccactctccgcatttctgtttaacagtctgatgccgcaagttgatctgagtacccctgacgggcgcgcacgtttgagtacgctggcactaccattgataagccaagtgccgggcgaaacgctgcgaatatatcttcgtcaggaattaggcaacaaattaggcatacttgatgacagccagcttgaacgattaatgccaaaagcggcagagagcggcgtttctcgccctgttccgcagctaaaacgcacgaccatgcgtatacttatagggttgctggtgcaaaatccagaattagcgacgttggtcccgccgcttgagaatctggatgaaaataagctccctggacttggcttattcagagaactggtcaacacttgtctctcccagccaggtctgaccaccgggcaacttttagagcactatcgtggtacaaataatgctgccacccttgaaaaactgagcatgtgggacgatatagcagataagaatattgctgagcaaaccttcaccgacagtctcaaccatatgtttgatagcctgcttgaactgcgccaggaagagttaatcgctcgtgagcgcacgcatggtttaagcaacgaagaacgcctggagctctggacattaaaccaggagctggcgaaaaagtgatttaacggcttaagtgccgaagagcgatcgggaagcccccgacagccgcactgagaggcagcggcaaatatataagtacgccctcgtaattatcgttggcggtaaacaaccgttggatttcagcgttaacggctgaaggacatcgggtcaatcgcccaacaccaacctcatgaaataagtgtggataccgtcttatggagcaaaacccgcagagtcagctgaaacttcttgtcacccgtggtaaggagcaaggctatctgacctatgccgaggtcaatgaccatctgccggaagatatcgtcgatagtgatcagatcgaagacatcatccaaatgatcaacgacatgggcattcaggtgatggaagaagcaccggatgccgatgatctgatgctggctgaaaacaccgcggacgaagatgctgccgaagccgccgcgcaggtgctttccagcgtggaatctgaaatcgggcgcacgactgacccggtacgcatgtacatgcgtgaaatgggcaccgttgaactgttgacccgcgaaggcgaaattgacatcgctaagcgtattgaagacgggatcaaccaggttcaatgctccgttgctgaatatccggaagcgatcacctatctgctggaacagtacgatcgtgttgaagcagaagaagcgcgtctgtccgatctgatcaccggctttgttgacccgaacgcagaagaagatctggcacctaccgccactcacgtcggttctgagctttcccaggaagatctggacgatgacgaagatgaagacgaagaagatggcgatgacgacagcgccgatgatgacaacagcatcgacccggaactggctcgcgaaaaatttgcggaactacgcgctcagtacgttgtaacgcgtgacaccatcaaagcgaaaggtcgcagtcacgctaccgctcaggaagagatcctgaaactgtctgaagtattcaaacagttccgcctggtgccgaagcagtttgactacctggtcaacagcatgcgcgtcatgatggaccgcgttcgtacgcaagaacgtctgatcatgaagctctgcgttgagcagtgcaaaatgccgaagaaaaacttcattaccctgtttaccggcaacgaaaccagcgatacctggttcaacgcggcaattgcgatgaacaagccgtggagcgaaaaactgcacgatgtctctgaagaagtgcatcgcgccctgcaaaaactgcagcagattgaagaagaaaccggcctgaccatcgagcaggttaaagatatcaaccgtcgtatgtccatcggtgaagcgaaagcccgccgtgcgaagaaagagatggttgaagcgaacttacgtctggttatttctatcgctaagaaatacaccaaccgtggcttgcagttccttgacctgattcaggaaggcaacatcggtctgatgaaagcggttgataaattcgaataccgccgtggttacaagttctccacctacgcaacctggtggatccgtcaggcgatcacccgctctatcgcggatcaggcgcgcaccatccgtattccggtgcatatgattgagaccatcaacaagctcaaccgtatttctcgccagatgctgcaagagatgggccgtgaaccgacgccggaagaactggctgaacgtatgctgatgccggaagacaagatccgcaaagtgctgaagatcgccaaagagccaatctccatggaaacgccgatcggtgatgatgaagatagccatctgggggatttcatcgaggataccaccctcgagctgccgctggattctgcgaccaccgaaagcctgcgtgcggcaacgcacgacgtgctggctggcctgaccgcgcgtgaagcaaaagttctgcgtatgcgtttcggtatcgatatgaacaccgactacacgctggaagaagtgggtaaacagttcgacgttacccgcgaacgtatccgtcagatcgaagcgaaggcgctgcgcaaactgcgtcacccgagccgttctgaagtgctgcgtagcttcctggacgattaatcggtaggccggatcaggcgttacgccgcacccggcactaggccctctgcacaaacgccaccttttcggtggcgttttttatcgcccacgcactaccagcgcctggtccagctcgcgatacgcttcaaccagtttctccagactaacgcgacttaaaccgctgggatttggcagcacccaaatctgcgtgctaccaatggtgagcgtttgtttcccccactgtgcaccgcgctggctgaatccctgttcatatgcttgtttgcccagaatcgccaacgcctgcggctgataatcttcaattttttcaatcagcttacgcccgcctgcgtgtagctcctgcttactaacttcattggcttgcaccgttggacggtctaccagtttggtgacgccacaacgataatccagcagatgctgtgcctcctgcggcttcaactgacggtcggtaaacccggcctgatatatcaccttccagaagcgatttgccggatgagcaaagggaaaaccagtcccggcggaactaagcccagggttgataccgcaaaacacgacccgtaaccctggagccaaaatatcctcaaccatatttactcctttctaacatcaccaggaaaagtataacggattgaaaatacattgtttataaaaacagcaggcgcgcggtaatggctggattgcgacacggagttactttataatccgctaccatggccccttagctcagtggttagagcaggcgactcataatcgcttggtcgctggttcaagtccagcaggggccaccagatatagcaaaggctgacgagaaatcgtcagcctttttctttttatatatcagttactttgcgtgccagtaagccgctgcacgtacccgctgtgggtcatactgttccgcttcaaagcggcggcttaaattcttaacgactttaccttcgccggttatccagatgaagtaatcatcggcagggatttgcatctgcgccagacgcgcatctaccgcctgctcatcatgtgccagccattcgatattaaaaccatcaaggtgcgcgagataatcctgacaggcgttatcccgcacgctaaccagcgcactaacttgcggtttaacggcaagtttgctcaacgtttccaggcggcggcgcaatgcaggcattccggattcatcgcagacatacagctgatacgcgtaatcttccggcaccaccaggctaccgcgcggacctgccaccgtaagtttatcgcccggttgcgcctgcatcgcccagccgctggcgaccccaccgtcgtgaataaagaaatcaatcgccagttcatggcgtagttcgtcatacagcggcgtatagtcacggctcggtgggcgtggtccttccggccagacgatgccctcttccgttaccgttggcggcacaaagtgagcgtcaggttgaggaaagaagagtttgctgtgatcgtcaaagccacggcttgtaaaaccgtccagcgcctcgccgccgaggacaatgcgctgaaaaccggcgctgatgcgctcaacgcgtaacacagtcagttcacggaagcgcagatcattgcgaacgcgctgcgggtagcggggggtgttattcattgttatcgccttcgtgatggtaatcagatatatctaaataaaactcgcaaatgataatgattgttaatcatgataaatgcaagcgatttgtagaactgatatgtctatagtctgataagacgaaccgcctcttctcaggcatcattactcaacgccggatgcggcgtgaacgccttatccggcctacgtgtgagatgagtccacgtttaaaaatcatttttacacttgcaagaacgctcatatcagatataaattagatatatctaattaagcaaaaggaggctgatatgagccatcatcacgaagggtgttgtaaacatgaaggccagccacgccatgagggctgctgcaaaggtgagaagagtgaacacgagcactgcggacacggtcaccagcatgaacacggtcaatgctgcggtggtcgccacggtcgcggcggcggtcgtcggcaacgtttctttggtcacggtgaattacgtctggtgattctggatattctcagccgcgatgacagccacggttacgaattgattaaagcgattgagaatctaacccaggggaattacaccccaagcccgggcgtcatctacccaacgctggattttctgcaggagcagagcctgattaccatccgcgaagaggaaggaggtaagaagcagattgcgctgaccgaacaaggcgcgcagtggctggaagaaaaccgcgaacaggtggagatgattgaagaacgcatcaaagcgcgttgcgttggcgcggcgctgcgccagaacccgcaaatgaagcgggcgctggataattttaaagcggtgctggatttacgcgtcaaccagagcgatatcagtgatgcacaaataaaaaagatcattgcggtgatcgaccgcgccgcttttgatattacgcaactggattaatcgccgcatccgccagtggcgcggtgcaattgccggatgcgacgcttgacgcgccttatccggcctacacccgctacacaccccgcaggcctgataagatgcgccagcatcgcatcaggcattgtgctccaaccgccggatccggcataccgattaatgcagtaccgtcaccgcgtcttccagtcggctggcgcggtgtttcaccatcgcgctcacctgcgcactctcttccaccagctcggcatttttctgggtgatcaggttaagctcatccactgcacgggtcaggctggaaagcccatcggcctgttccagcgtactatggctaatctgggcgatcaactgggtgacgtttttcacctgtgccacaatatcttccatcgtccgtccggcggcgtgtacctgctggctaccggattgcaccttatcagcactggcatcaatcagcttgcgaatatcgttggcagcattagcgctgcggctggctaaatgacgcacttcccctgccaccactgcaaaacctttgccctgttcgccggcacgcgccgcttccaccgccgcattcagggccagaatattggtctgaaacgcaatatcgttaatcaggctagtaatggtgccaatgcgctgggtactgtcggcgatatcgtccattgtcttgatcaccgtggtcatcgcctccccaccctgcactgccgcattactggcagtgatactcagtttatcggcagcgctcgccgtggcagagttctgtttcacgctcgccgccatttggttcatggtcgccaccgtttgctgaacgttatcaactgtctgctgggtatgttcgttcagttcatcggtgcctttcgccagcgtctcactgccatttctgacactggacacctggctactgacatcgttaattagccaacggcacatcaggccaagttgccctaccgcacgtaatgtcagccccagctcatcgctgcgattcagatgctcaacactattacgttctccggtcgccaccttcagtgcctgatgggcaacattttctatcgggcgcacaatctgccattcaaaacaggcgcttgccaacaataccactaacgcacagaggatatacgtcaccaccggggcagcaacaaaccaaagcatggccgccagcaagataaacatcagggtcatcactccacgcgcccgccagcgaagcggtaaactaggcagtttacccagccagcctttacgcaccaccaggcctttatgaatacgcttactggtacgtccggcgttcaacgctttgtacagcggctccaccgccgcgatctcttcatccgtcgcccgggtacgaatgctcatatagccactgatttttccctcgcgcaccatcggtaccgcattggcccgcacccaataatggtcaccatttttgcggcgatttttcacgatgccgctccagggctccccttttttcagggtgaaccacatatccgcaaacgccgcttttggcatatccgggtgacgcaccatgttgtgcggctgcccttgtaactcttgcaaggtatagccgctcacctgcacaaaagtgtcattagcatgagtgatatagctttgcagatcggtagtggacatcagagtggtatcgtccgccagcggggtattttgctgggtgacatacggatgagaagacatgttcgcgtcctgtgcaggttatatggttgttaacttcttgtcagagtttatgtcggccccgctgcggttatctttaaccgattaatttgatttagatcgcaatttgcgatttaaacacaaatctaattccttgatttaaaatactttcactctgttactatacgaaaacgttaattatcttgcccaaaaatcaggcaattattgccctgaaaacgtgcatttgcgcagcaatcatcaaatccatacccgacaaaaaccgtgcaaaataacaacaaatgttaacagatagcattaaatattgcacaaatgataaccgaatttgtgtttatcccgattttcgcgatcgcagccggagtggcgcaatccctgcaatacttaaatcggtatcatgtgatacgcgagcctccggagcatattttgaacaggttacctagcagcgcaagcgctttagcgtgcagcgcccacgccctgaatctcattgagaagcgaacgctggatcatgaggagatgaaagcacttaaccgagaggtgattgaatacttcaaagagcatgtcaatccggggtttttagagtatcgcaaatctgttaccgccggcggggattacggagccgtagagtggcaagcgggaagtttaaatacgcttgtcgacacccagggccaggagtttatcgactgcctgggaggttttggaattttcaacgtggggcaccgtaatccagttgtggtttccgccgtacagaatcaacttgcgaaacaaccgctgcacagccaggagctgctcgatccgttacgggcgatgttggcgaaaacccttgctgcgctaacgcccggtaaactgaaatacagcttcttctgtaatagcggcaccgagtccgttgaagcagcgctgaagctggcgaaagcttaccagagtccgcgcggcaagtttacttttattgccaccagcggcgcgttccacggtaaaagtcttggcgcgctgagcgccacggcgaaaagcaccttccgcaaaccgtttatgccgttactgccgggcttccgtcatgtgccgtttggcaatatcgaagccatgcgcacggctcttaacgagtgcaaaaaaaccggtgatgatgtggctgcggtgatcctcgaaccgattcagggtgaaggtggcgtaattctgccgccgccgggctatctcaccgccgtacgtaagctatgcgatgagttcggcgcactgatgatcctcgatgaagtacaaacgggcatggggcgcacgggcaagatgttcgcctgcgagcatgagaacgtacagccggatatcctctgccttgccaaagcgctcggcggcggcgtgatgccgattggcgcgaccatcgccactgaagaggtgtttagtgttctgttcgacaacccattcctgcataccaccacctttggcggcaacccgctggcctgtgcggcggcgctggcgaccatcaatgtgttgctggagcagaacttaccggctcaggctgagcaaaaaggcgatatgttgctggacggtttccgtcaactggcgcgggaatatcccgatctggtacaggaagcgcgtggtaaagggatgttgatggcgattgagtttgttgataacgaaatcggctataactttgccagcgagatgttccgccagcgcgtactggtggccggaacgctcaataacgccaaaacgatccgcattgaaccgccactgacactgaccattgaacagtgtgaactggtgatcaaagcggcgcgtaaggcgctggcggccatgcgagtaagtgtcgaagaagcgtaatatcaaatcggatggcgatacgacgtcgccatccgatctttttatacgacgcgtacgcccgcaggcatcatccgctccggcgttaacagcacgctttcactgccgtcatcggtttccgcacacaacagcatgcattcgctcgtttcaccacgcattttcgctttttgcagattgcataagaccaccaccgttttccccatcagctcttcttcgctgtagtacggcaccaggctggtcacggtttgcagcgttttttgccccacatcaacctgtacgatgtacagcttgtcggcgttttcatggcgtttcacttccacaatctttccgacgcgcatttccagacgtgcaaaatcagcgtaagccacggtttccattgcttcctcccttagggtaaaattttactaaactatagcaaaagtttttctcaatcctgtaggctaaaaatggagaatgcaggcgtgatcacattcgtgagccgctgtgttaccgttacagcgtcaaagaaacgcgctttatttactgaaaacaggtgacccgataagcacttcctctacaatgggggcgcacatcagggaaagtaaaaaaggtaaacatggcaacactaaaagacatcgcaatcgaagctggcgtatccctggcgacagtatccagggtcttaaatgacgatccgacattgaatgtgaaagaagagacgaaacatcgcattctcgagatcgccgaaaagctggagtacaagaccagtagtgcccgtaaactccagacaggtgcagtcaaccaacaccatattctggctatctacagctaccagcaggagctggagatcaacgatccttactatctggcgatccgccacggcattgaaacccagtgcgaaaagctgggcatcgagctcaccaactgttatgaacacagcggcttaccagacattaaaaacgtcaccggtattttaattgtcggcaaacccacgcccgccctgcgcgccgctgccagcgcgttgaccgacaatatctgttttatcgactttcacgaacccggcagcggttacgatgcggtggatatcgatctggcacgcatcagtaaagaaatcatcgacttctatatcaaccagggcgttaatcgtattggttttattggcggtgaagatgagcctggcaaggcggatattcgtgaggtcgcctttgcggaatatggccgactgaaacaagtggtacgcgaagaggatatctggcgcggcggtttttccagtagcagcggttatgaactggcaaaacaaatgctggcgcgggaagactatccgaaggcactgtttgttgcttccgattccattgctatcggcgtactgcgggcaattcatgaacgaggcctgaacatcccacaggatattagccttatcagcgttaacgatatccccaccgcgcgatttacctttccgccgctctccaccgtgcgcatccattccgagatgatgggaagtcagggcgttaacctggtgtatgaaaaagcccgcgatggtcgcgcgctgccgctgttagtcttcgttcccagcaaattaaaactgcgcggcacgacccgttaaatccccttacacactgtccggcaatcgtttttgccggacagtgctgccgtttattttcgtgatccagttaaagtaaatgcatttacctgctactttttagtaaaaattttactaaactccccagcaattacacaaactaccatcaccatgaatggttccgatttctctctaccgggaggccctatgaatcgctgggaaaacattcagctcacccacgaaaaccgacttgcgccgcgtgcgtacttttttagttatgattctgttgcgcaagcgcgtacctttgcccgcgaaaccagcagcctgtttctgcccttaagcggtcagtggaatttccacttttttgaccatccgctgcaagtaccagaagccttcacctctgagttaatggctgactgggggcatattaccgtccccgccatgtggcaaatggaaggtcacggcaaactgcaatataccgacgaaggttttccgttccccatcgatgtgccgtttgtccccagcgataacccaaccggtgcctatcaacgtattttcaccctcagcgacggctggcagggtaaacagacgctgattaaatttgacggcgtcgaaacctattttgaagtctatgttaacggtcagtatgtgggtttcagcaagggcagtcgcctgaccgcagagtttgacatcagcgcgatggttaaaaccggcgacaacctgttgtgtgtgcgcgtgatgcagtgggcggactctacctacgtggaagaccaggatatgtggtggagtgcggggatcttccgcgatgtttatctggtcggaaaacacctaacgcatattaacgatttcactgtgcgtaccgactttgacgaagcctattgcgatgccacgctttcctgcgaagtggtgctggaaaatctcgccgcctcccctgtcgtcacgacgctggaatataccctgtttgatggcgaacgcgtggtgcacagcagcgccattgatcatttggcaattgaaaaactgaccagcgccagctttgcttttactgtcgaacagccgcagcaatggagtgcagaatccccttatctttaccatctggtcatgacgctgaaagacgccaacggcaacgttctggaagtggtgccacaacgcgttggcttccgtgatatcaaagtgcgcgacggtctgttctggatcaataaccgttatgtgatgctgcacggcgtcaaccgtcacgacaacgatcatcgcaaaggccgcgccgttggaatggatcgcgtcgagaaagatctccagttgatgaagcagcacaatatcaactccgtgcgtaccgctcactacccgaacgatccgcgtttttacgaactgtgtgatatctacggcctgtttgtgatggcggaaaccgacgtcgaaagccacggctttgctaatgtcggcgatattagccgtattaccgacgatccgcagtgggaaaaagtctacgtcgagcgcattgttcgccatatccacgcgcagaaaaaccatccgagcatcatcatctggagcctgggcaatgaatccggctatggctgtaacatccgcgcgatgtaccatgcggcgaaagcgctggatgacacgcgactggtgcattacgaagaagatcgcgatgctgaagtggtcgatattatttccaccatgtacacccgcgtgccgctgatgaatgagtttggtgaatacccgcatccgaagccgcgcatcatctgtgaatatgctcatgcgatggggaacggaccgggcgggctgacggagtaccagaacgtcttctataagcacgattgcattcagggtcattatgtctgggagtggtgcgaccacgggatccaggcacaggacgaccacggcaatgtctggtataaattcggcggcgactacggcgactatcccaacaactataacttctgtcttgatggtttgatctattccgatcagacgccgggaccgggcctgaaagagtacaaacaggttatcgcgccggtaaaaatccacgcgcgggatctgactcgcggcgagttgaaagtcgaaaataaactgtggtttaccacgcttgatgactacaccctgcacgcagaggtgcgcgccgaaggtgaaacgctcgcgacgcagcagattaaactgcgcgacgttgcgccgaacagcgaagcccccttgcagatcacgctgccgcagctggacgcccgcgaagcgttcctcaacattacggtgaccaaagattcccgcacccgctacagcgaagccggacaccctatcgccacttatcagttcccgctgaaggaaaacaccgcgcagccagtgcctttcgcaccaaataatgcgcgtccgctgacgctggaagacgatcgtttgagctgcaccgttcgcggctacaacttcgcgatcaccttcagtaaaatgagtggcaaaccgacatcctggcaggtgaatggcgaaagcctgctgactcgcgagccaaagatcaacttcttcaagccgatgatcgacaaccacaagcaggagtacgaagggctgtggcaaccgaatcatttgcagatcatgcaggaacatctgcgcgactttgccgtagaacagagcgatggtgaagtgctgatcatcagccgcacagttattgccccgccggtgtttgacttcgggatgcgctgcacctacatctggcgcatcgctgccgatggccaggttaacgtggcgctttccggcgagcgttacggcgactatccgcacatcattccgtgcatcggtttcaccatgggaattaacggcgaatacgatcaggtggcgtattacggtcgtggaccgggcgaaaactacgccgacagccagcaggctaacatcatcgatatctggcgcagcaccgtcgatgccatgttcgagaactatcccttcccgcagaacaacggtaaccgtcagcatgtccgctggacggcactgactaaccgccacggtaacggtctgctggtggttccgcagcgcccaattaacttcagcgcctggcactatacccaggaaaacatccacgctgcccagcactgtaacgagctgcagcgcagtgatgacatcaccctgaacctcgatcaccagctgcttggcctcggctccaactcctggggcagcgaggtgctggactcctggcgcgtctggttccgtgacttcagctacggctttacgttgctgccggtttctggcggagaagctaccgcgcaaagcctggcgagctatgagttcggcgcagggttcttttccacgaatttgcacagcgagaataagcaatgaggatcatcgataacttagaacagttccgccagatttacgcctctggcaagaagtggcaacgctgcgttgaagcgattgaaaatatcgacaacattcagcctggcgtcgcccactccatcggtgacagtttgacttaccgcgtggagacagactccgcgaccgatgcgctatttaccgggcatcgacgctattttgaagtgcattactacctgcaagggcagcaaaaaattgaatatgcgccgaaagagacattacaggtagtggaatattatcgtgatgaaactgaccgtgaatatttaaaaggctgcggagaaaccgttgaggtccacgaagggcaaatcgttatttgcgatatccatgaagcgtatcggtttatctgcaataacgcggtcaaaaaagtggttctcaaagtcaccatcgaagatggttatttccataacaaataacaactacggcggcaaaaggagtttgccgccaccgctaccctactcattttcggagatgtgttatgtctgataccaaacgtaatacaatcggcaaattcggcttgctcagcctgacttttgccgccgtttacagctttaacaacgttatcaataataatattgagcttggactggccagcgcaccgatgtttttcctcgcgacgattttttattttattcccttctgtctgatcatcgcagaatttgttagcttaaataaaaacagtgaagccggtgtctacgcgtgggtaaaaagtagcctgggcggacgttgggcatttattactgcctatacctactggttcgtaaacctgttctttttcaccagtctgttgccgcgcgttattgcttatgctagctatgccttcctcggatacgaatatattatgacgccggttgccaccaccattatcagtatggtgctgttcgccttctccacctgggtttccaccaacggggcgaaaatgttggggccaattacctccgtcactagtacgctgatgctgctgttaacgctctcctacattttactggcaggtacggcgctggttggcggcgtacagcctgctgacgccatcaccgttgacgcgatgatcccgaacttcaactgggcgttcctcggcgttaccacctggatctttatggccgcaggtggcgcggagtccgtcgctgtgtacgttaacgacgtcaaaggcggtagcaaaagcttcgttaaagtgatcatcctcgccgggatttttatcggcgtactgtattccgtctccagcgtgctgattaacgtcttcgtcagcagcaaagagttgaaatttaccggcggaagcgtgcaggtattccacggcatggcggcgtattttggtctaccggaagcgttgatgaatcgctttgtcggtctggtgtcctttaccgcgatgttcggttccctgctgatgtggaccgcaacgccggtgaaaattttcttctccgaaatcccggaaggcatctttggtaagaaaaccgtcgaactgaacgaaaacggcgttccggcgcgcgcagcgtggatccagttcctgatcgtcatcccgctgatgattatcccgatgctcggttccaataccgtgcaggatctgatgaatactattattaatatgaccgccgcagcgtccatgcttccgccgttattcatcatgctggcttacctgaatttacgcgccaaattagatcacctgccacgcgatttccgtatgggctcccgccgcaccggtattatcgttgttagtatgctgattgcgatatttgccgtagggtttgtcgctagcacattcccgactggcgcgaatattctgaccatcattttttataacgtcggcggtattgttatcttccttggctttgcgtggtggaaatacagtaaatatataaagggattaacggctgaagagcgccatattgaagcgacgccagccagcaatgttgattaagcagaataataaaaaatgagcaggcattttccctcttcctggatgaggagagggaaaatagtttctgcctttatatttttataattacaacgataaaaggctgtactttttctttagctcatggattaacacaatgaaattaatcactgcaccatgcagagcattacttgctctgccgttttgctacgccttttctgcggcaggagaagaagcacgtccggcagaacatgacgacacaaaaacacccgcaattaccagcacatcttctcctagttttcgtttttacggcgaattaggggttggtggatatatggatttagagggtgagaataaacataaatacagcgacggtacctatattgaaggtggcctggagatgaagtacggctcctggttcggcctgatttacggcgaaggctggaccgtgcaggccgaccacgacggcaatgcctgggtgccagaccatagctggggtggtttcgagggcggaattaaccgtttctatggcggttatcgtaccaatgatggcaccgaaatcatgctcagtctgcgtcaggattccagcctggatgacctgcaatggtggggcgatttcacccccgatctgggctacgtcattcccaatacccgcgacattatgactgcgctgaaggtacagaacttaagcggcaactttcgttatagcgtcaccgcgactcctgccggacatcatgatgaaagcaaagcctggctacattttggcaaatacgatcgctatgacgacaaatacacctatccggcaatgatgaacggttacatccagtatgaccttgccgaaggcatcacctggatgaacggtctggaaatcaccgacggcacaggacagctctatctcacgggcctgctaactcctaactttgccgctcgcgcctggcaccataccggacgcgccgacgggctggacgtaccgggaagtgaaagtgggatgatggtgagcgccatgtatgaagcgttaaagggcgtttatctctccaccgcttacacctacgccaaacatcgccctgaccacgctgacgatgaaaccacctctttcatgcagtttggtatctggtacgaatacggcggcggacgtttcgccacggcttttgatagccgcttctacatgaaaaatgcctctcacgatcccagcgaccaaatcttcctgatgcaatatttctactggtaataaggactgtaatttcatgaaaataaaaactattttaacgccagtaacctgcgctctgctgataagtttttccgcccatgccgctaacgccgacaattataaaaacgtgattaaccgtactggcgcgccgcagtacatgaaggattacgattacgacgatcaccagcgttttaatccgtttttcgatctcggagcctggcatggtcatctgttgccagacggccctaacaccatgggcggctttccgggcgttgcgctgctgacggaagagtacatcaactttatggccagcaatttcgaccgcctgaccgtctggcaggacggcaagaaagtcgactttacgctggaggcatacagtattcccggtgcgctggtgcaaaaactgacagcaaaagatgtgcaagtcgaaatgactctgcgcttcgccacgccgcgcacgagtctactggaaaccaaaatcaccagcaataaaccgctggatctggtgtgggacggcgaactgctggaaaaactggaagcgaaagaagggaaaccgctttccgataaaaccattgctggcgaataccctgactatcagcgcaaaatcagcgccacccgtgatggcctgaaagtcacctttggcaaagtgcgcgccacctgggatctgctgacctccggcgaaagcgaatatcaggtgcataaatccctgccggtgcagactgaaatcaacggtaatcgctttaccagtaaggcgcatatcaacggtagcaccacgctctacaccacctattcccatctgctgaccgctcaggaagttagcaaagagcaaatgcagatccgcgatattctggcgcgtccggcgttttatctcaccgccagccagcaacgctgggaagaatacctgaagaaagggttaaccaatccggatgcgacgccggaacagacgcgcgtcgcggtgaaagcgatcgaaacgctcaacggtaactggcgcagtccgggcggtgcggtgaaatttaacaccgttacaccgagcgtgaccgggcgctggttctccggcaatcagacctggccgtgggatacctggaagcaggcgtttgcgatggcgcatttcaatccggacatcgccaaagagaatatccgcgcggtcttctcctggcagatccagcctggcgatagcgtgcgtccgcaggatgtgggctttgtccccgacctgatagcgtggaaccttagccccgagcgtggtggcgatggcggcaactggaacgaacgtaataccaaacccagccttgccgcctggagcgtgatggaagtgtataacgtcacccaagataaaacctgggtggcagagatgtacccgaaactggtggcctatcacgactggtggttacgtaaccgcgatcacaacggcaacggcgtgccggaatatggcgcgacccgcgacaaagcccacaacactgagagcggcgagatgctgtttacggtgaaaaaaggcgataaagaagagacgcagtctgggctgaacaactacgcccgcgtggtggagaaaggccagtacgacagtctggaaattccggcacaggttgctgcaagctgggaaagcgggcgtgatgatgccgccgtctttgggtttatcgacaaagaacagttggataaatatgtcgctaatggcggcaaacgtagcgactggacggtgaaattcgccgaaaaccgcagtcaggacggaacgttgctgggctacagcctattgcaggagagcgtggatcaggccagctatatgtacagcgataaccattatctggcggagatggcaaccatcctcggtaagccagaagaggccaaacgctatcgccagttggcacagcagctcgcggactacatcaacacctgtatgttcgacccgactacccagttctactatgacgtacgtattgaagataaaccactggcgaacggctgcgcgggcaaaccgattgttgagcgcggtaaagggccggaaggctggagcccgctgtttaacggtgcggcaacgcaggccaatgccgacgcggtggtgaaggtgatgctcgatcctaaagagttcaacacctttgtcccgctgggaacggcggcgttaaccaatccggcttttggcgctgatatctactggcgtgggcgcgtatgggtggatcagttctggtttggtctgaaagggatggagcgttacggttatcgtgatgatgccctgaagctggcggatacgttcttccggcacgccaaagggttaaccgccgatggaccaattcaggaaaattacaacccgctgacaggcgcacagcaaggcgcaccaaatttctcctggagtgccgcgcatttgtatatgttgtataacgattttttccgtaagcaataatttgcaactgctggcggatgcggcgtaaacgccttatccgccctacatgtgcaatcctcctggccggataaaacgcggcaagcgttgcatccggcaactgcaccgcgccactggcggatgcggcgtgaacgccttatccgccctacatgtgtgttcccgtaggtcggataagacgcgacaagcgtcgcatccggcatctgcaccgcgccactggcggatgcggcgtggacgccttatccgccctacatgtgcaattccgtaacctggataaaacgcgacaagcgtcgcatccggcgttatcaccgggcgtattctttttgaatcccatcacaaaccccgcactccccttttcccttttctccggcgacggctaaattagaactcatccgaccacataacaattattttacatactggacaattttatgagctacccgagcctgttcgccccgctggatttaggttttaccacgttaaaaaaccgcgtgttgatgggcagtatgcacaccgggctggaggaatacccggacggtgccgagcggctggcagcgttttatgccgaacgcgcccgtcacggcgtggcgctgattgtcagcggcggcattgcaccagatttaacaggcgttggcatggaaggtggcgcaatgctcaacgacgccagccagatcccacaccatcgcaccattaccgaagcggtacatcaggaaggcggcaaaatagccctgcaaattttgcataccgggcgctacagctaccaaccgcatctggtcgccccgtccgcattgcaggcccccatcaaccgtttcgtgccccatgagttaagccatgaagagatcctgcaactgatcgacaatttcgcccgctgcgcgcaactggcgcgggaggcaggatacgacggtgtagaggtgatgggttccgaagggtatttgatcaacgaatttctgacgctgcgcaccaatcagcgtagtgaccagtggggcggcgattaccgcaaccggatgcgatttgccgtagaagtagtgcgtgcggtgcgcgaacgcgtcggcaacgacttcattattatctaccgactgagcatgctcgacctggtcgaagacggcgggacttttgccgaaacggtagagctggcgcaggccattgaagcggcgggcgcgaccattatcaacaccggcattggctggcatgaagcacgtattccgaccattgccacgcccgtgccgcgcggcgcatttagctgggtcacgcgcaaactgaaaggccacgtcagcctgccgctggtaaccaccaaccggattaacgatccgcaggttgccgacgatattctcagccgcggcgatgccgatatggtaagcatggcgcgaccgtttcttgctgatgcggagctgctgagtaaagcgcaaagcggacgagccgatgagatcaacacttgtattggctgcaatcaggcctgtctcgatcaaatcttcgttggcaaagtcaccagctgcctggtgaatcctcgcgcctgccacgaaaccaaaatgccaatccttcccgccgtgcagaaaaaaaatctggcggtggtcggtgcgggacctgctgggctggcgtttgccattaacgcggcggcgcgtgggcatcaggtaacattgtttgacgctcatagcgagattggcgggcagtttaatatcgccaaacagatccccggcaaagaggagttttacgaaacgctgcgctattaccgccggatgatcgaagtgacgggcgtgacgctaaaactcaatcacaccgtgacggcggatcagttacaggctttcgatgaaacgatcctcgccagtgggatcgtgccgcgcactccgcccatcgacgggatcgatcatccgaaggtattgagttatctcgatgtactgcgcgacaaagcgccggttggcaacaaagttgccatcatcggttgtggcgggattggttttgatacggcgatgtatttaagtcagccgggcgaatccaccagccagaatatcgccgggttctgtaatgaatgggggatcgacagtagcctacaacaggctggtggcttaagcccgcagggaatgcagatcccccgtagcccacggcagattgtgatgctccagcgcaaagccagcaaaccaggacaggggttaggcaaaaccaccggctggatccatcgcaccaccctgctcagccggggtgtgaaaatgatcccaggcgtaagttatcagaagattgacgatgacgggctgcatgtggtgatcaacggcgaaacgcaggtattagcagtggacaatgtggtgatctgcgcagggcaagagccaaaccgcgcgctggcgcaaccgctgattgatagcgggaaaacggtgcatttaattggcggctgcgatgtggctatggagctggacgcacgacgggcaattgcccagggaacacggctggcgctggagatttaaatcgttatttgaagcgccggatgcaacgcatccggcacgtcgcgttaatcaataaacaaggcgggagaaatgccgaatcgcgttgccaattttttagcgtgttccagcgttaatttcctcttcccgctcaaaacgcgactcaccatagatttactgccaatttccggcagatcggaaagggttaaaccatattgatccataagggtacgaatcacggctataccgccaggcatggcttgagccatggcattaaattccgcaaattcgggcgcactttcttcccacgcggttattttggcacacaccagatccagcaaggggttttcaggatcgttgagcagcagatgatctaccagttccagcgcctgggtgtattgttcctcgttctgaatacccgccagaaaaggtgccacagcagttagcttttctcctgcttgcaagatgtcggcaatcgcaatcattttttccccttagtacgatgaacagcggtaaagaaatcgtattctttatgcgtcataacttcacgtatgtagcacttttggctttcaaaaaagaccattgctacaacacgtaattcattgcccccaacattgaaaacataatgcttatccagatatttgaagttatccagagatgggaatactgcttttaaactctcaggttttttgaaatatcccttagcaatcgtgttccccagagccaccaactccgttttatgttgcgggtatttttccgcagcatctttcaatgctttttgagttatcaggtgcattcttcatcacgtccgttgacaaattggcaatatgataacatccgttgccagattggcaacggatgaatttatctgtgtgacggaagaataaacgtagaaaaacgctaaacaagagaatgtagacgatggtgacagggattttttgttttatggaagcgcgattccagaactgggcagacattgccggatgcgacgcttgccgcgtcttatccggcctggagtaacgtgctgaacgtaggccggataaggcgtttacgccgcatccggcaggtaactcccaatcttaccgacgacgtcccagcttcaccgctttcagtaccacaaatttattattcgtcgcaatagtggtgcagttgccgaaaatcttcttcagtttatggaagtaatccaggtgacggttggcaacgatatacagctcgccgttgattttcaggcagcggcgggcgtggtggaacatctcccaggcgacgttatcggtcagcgcatgttgttggtgaaacggcgggttgcagagcacagcattaaagcggaaaggctccacgccggagagcgcgttgttgatcataaactcgcagcgatccaacgcctctggcatgttggtttcaacgttcaaacggctggaagcaaccgccatcgggctttcatcgacaaacaccactttcgcctgcgggtttttatcaagcagcgtcagaccaataacgccattaccgcaaccgagatcgacaatctccccttcgagattctctggcagatgttgcataaagaagcgcgcgccgatatcaagcccggtgcgggagaagacattcgcatggttgtggatagtccagtcagtaccttccagcttccagctaacggtctgcggcgcatcggccagctgcggttcattgaaagtgcaattaatcaggcgcgcttttttccatgccagcgtggtggtggttgggccgagcactttttcgaacagttccagcgtggaagtgtgaatgtcacgggccttggcaccggcaataatacgtgtatcgctcgtgaccactttgcgcagcgcacgcagttgctgttccagcaatgccagtgttttcggcactttgatcagcaccacacccggctgttgcgggtagtcggcggtgctgtcgagaaacttcacgctgctctcatcaatcccgttgaggcgtaaattctcgcgcgtcgccagttcactgatgtaactgtcgccaatgctgtacggcttatgttccgccagtgcgcagcttaacgcaccaaaggcatcattcaggatcaacaccgggccgcggatttctgtgtcgtccaactgttgcagcaaatattcatccgccgcttcccacgcctgtagcgggttaacgtcatccgtcgccggaaaacgttgtagtgtcagactacggaaaccgttgtctaagtggctcatcggccctcctgaatgataaaatttcgacattgcccctgaaaagggtgcgtgagtataccctttttctctttttcgtgggcggttatgagcaatcttacttatcttcagggttatcccgagcagctactttcccaggtgcgaacactgattaacgaacagcgtctgggcgatgtgctggcaaaacgctatccgggaacacacgactacgccaccgataaagccctctggcaatatactcaggatctgaaaaatcagtttctgcgtaatgccccgccgatcaataaagtgatgtatgacaataagatccatgtgctaaaaaacgcgctcgggttacataccgctgtttctcgtgtgcagggcggcaagctgaaagcaaaggtggagatccgcgtcgctaccgtgtttcgcaacgcgccggaaccgtttttgcgcatgatcgtggtgcacgagctggcgcacctgaaggagaaagagcataacaaagcgttttaccagttgtgttgtcatatggaaccccagtaccaccagcttgagttcgacacccgactgtggctaacgcagttgagccttgggcagaacaaaatctgaaaatgatgtcaggcgttatcttttctttctttagcgcctaaaatcgacctcccccctttcgttaaggataacgaccatgctgcgcgcatttgcccgccttcttctccgtatttgtttttctcgccggactctaaagattgcctgcttactgttacttgtggcaggagcgaccatccttatcgccgatcgcgtaatggtcaacgccagcaaacagctgacctggagcgatgtcaacgccgttccggcgcgtaacgtgggtttattgctgggggcgaggccgggtaatcgctactttacccgacgtattgataccgcagcagcgttgtaccacgccggaaaagtgaaatggctgctggtaagtggcgataacggacgtaaaaattacgatgaagcaagtggtatgcagcaggctttgatcgctaaaggcgtaccagcaaaagtgatcttctgcgactatgccggattcagtacgctggatagcgtagtgcgtgccaaaaaggtttttggtgaaaaccatatcaccattatcagccaagaatttcataatcaacgcgccatctggctggcaaaacagtacggcatcgacgctatcggttttaacgcgccagacctcaatatgaagcacggtttttatactcaactgcgggagaaactcgctcgtgtcagcgccgtgattgacgccaaaatcctccatcgccagccgaaatatctcgggcctagcgtcatgattgggccgtttagtgagcatggctgtccggcgcagaaataatgcgtatctgcgcacgtcgaagatgaaaaaggcgtgctacattgacgacagaatccctttatggagtatccacgcgttatgatacgtttcgctgtgattggtacgaactggatcactcgccagttcgtcgaggccgcccatgagagcggtaaatacaagttaaccgccgtatattcccgcagccttgaacaggcccagcacttcgccaatgatttttctgtcgagcatctgtttaccagcctggaagcgatggcggaaagcgatgccattgacgcggtgtatattgccagcccgaattccctgcatttttcccagacacaacttttccttagccataaaattaatgtgatttgcgagaaaccgctggcgagcaatctggcggaagtggatgccgccattgcctgtgcgcgggaaaatcaggtggtgctgtttgaggcatttaaaaccgcctgcctgccgaactttcatttgttgcgccaggcgctgccgaaagtcggcaaactgcggaaagtctttttcaactattgccagtattccagccggtatcaacgttacctggatggtgagaatcccaacacctttaatccggcattctctaacggtagtattatggatatcggtttttactgtctggcgagcgcggtggcgttatttggtgagccgaaaagcgtgcaggcaaccgccagtttgctggcaagcggcgttgacgcccagggcgtggtggtgatggattacggtgatttcagcgtcaccttgcagcacagtaaagtcagtgattctgtcctggcgagcgagattcagggcgaagcaggaagcctggtgattgaaaaactgtctgaatgccagaaagtgtgcttcgtgccgcgtggcagccaaatgcaggatctcacccagccgcagcatattaataccatgctctacgaagcagagctgttcgctaccctggtggatgagcatctggtggatcatccagggctggcggtcagtcgcatcaccgccaaactgctgaccgagatccgccgccagactggggtgatttttccggcagatagcgtaaaactataattgccaaagtaaaacagtgtaaaaggtatgtaacagaccattgactggctgaatggtctgtcatactttgttacctgcaaaggggagtaacttcattgccggtcgatcgtcattacgatgtgtgaaaaaacacatccggtcaccgggcaacccgaaaggaatacgcagacgtattccttttttgttgtaagtgagaccttgccggaaggcgaggtctatgcataaaaagcagcggctgacgtcttccgacgttggccgtttttttatgtgtaaggaacttctatgaatactgtcggcacgccgttgctatggggcggattcgctgttgttgtcgccattatgctggctatcgacctgttgttgcaggggcgtcgtggggcacatgccatgaccatgaaacaggctgcggcctggagcctggtctgggtgacgctgagcttactgtttaacgccgctttctggtggtatctggtgcaaaccgaaggtcgcgccgttgccgatccacaggcactggcctttctcacaggttatctgattgagaaaagcctggcggtcgataacgtctttgtctggctgatgttgttcagctatttctctgttccggcggcattacaacgccgcgtgctggtgtatggcgtgctcggggcgattgttctgcgtaccatcatgatcttcactggcagctggctaattagccagttcgactggatcctgtatatcttcggtgccttcctgctgtttaccggcgtgaagatggcgctcgcccatgaagatgaaagtggcattggcgacaagccgctggtgcgctggctacgcggtcatttgcgcatgaccgacaccatcgacaacgagcatttctttgtgcgtaagaatggattgctgtacgccacaccgctgatgctggtactgattctggtggaattgagcgacgtgattttcgccgtggatagcattccggctatcttcgccgtgaccactgacccgttcattgtgctgaccagtaacctgtttgcgatcctcggcctgcgtgcgatgtatttcctgctggcgggcgtagcagagcgtttcagcatgctcaaatatggcctggcggtgattctggtgtttatcggtatcaagatgctgattgtcgacttctaccatattccaatcgccgtcagcctgggcgtggtgtttggcattctggtgatgacgtttattatcaacgcctgggtgaattatcggcatgataagcagcggggtggataatttttaatctgcctaagccgtgtaccctgtcattaacatgagcaccgttttctccctctcccttccagggagagggtcggggtgagggtaatttttcgcaccgatgctggcctgttcccctcaccctaaccctctccccaaacggggcgaggggactgaccgagtccttttttgatgttgtcatcagtctggaagccgcacgttggctttatttttatgtcaaagaaatgtaaccattaagtttcaaaatatgacctctctttaaaatccagcatttttcgcttcccgaagctgtaactttccttatactcgaccttgcaaacactttgttacatcctgaaagatgcgtcgacagaacgcaccagggatgtgcgacaacacaatgaaaggatcgaaaaatgactacgcaacgtagtccggggctattccggcgtctggctcatggcagcctggtaaaacaaatcctggtcggccttgttctggggattcttctggcatggatcagtaaacccgcggcggaagctgttggtctgttaggtactttgttcgtcggcgcactgaaagccgttgcccccatcctggtgttgatgctggtgatggcatctattgctaaccaccagcacgggcagaaaaccaatatccgccctattttgttcctctatctactgggcaccttctctgctgctctggccgcagtagtcttcagctttgccttcccttctaccctgcatttatccagtagcgcgggtgatattagcccgccgagtggcattgtcgaagtgatgcgcgggctggtaatgagcatggtttccaaccccatcgacgcgctgctgaaaggtaactacatcgggattctggtgtgggcgatcggcctcggcttcgcactgcgtcacggtaacgagaccaccaaaaacctggttaacgatatgagcaatgccgttacctttatggtgaaactggtcattcgcttcgcaccgattggtatttttgggctggtttcttctaccctggcaaccaccggtttctccacactgtggggctacgcgcaactgctggtcgtgctggttggctgtatgttactggtggcgctggtggttaacccattgctggtgtggtggaaaattcgtcgtaacccgttcccgctggtgctgctgtgcctgcgcgaaagcggtgtgtatgccttcttcacccgcagctctgcagcgaacattccggtgaatatggcgctgtgtgaaaagctgaatctggatcgcgatacctattccgtttctattccgctgggagccaccatcaatatggcgggcgcagcaatcactattaccgtgttgacgctggctgcggttaatacgctgggtattccggtcgatctgcccacggcgctgctgttgagcgtggtggcttctctgtgtgcctgtggcgcatccggcgtggcgggggggtctctgctgctgatcccactggcctgtaatatgttcggtattagcaacgatatcgccatgcaggtggttgccgtcggctttatcatcggcgtattgcaggactcttgcgaaaccgcgctgaactctagtactgacgtgctgttcactgcggcagcttgccaggcagaagacgatcgtctggcaaatagcgccctgcgtaattaattgtttaacccctttcgtctacggcggaaggggttttctcaactttaaacggatcaattccccttttctgcatccgccagaaacgaatgatattcaggccattcataagcagaaaactaccctcaatcatcgtgccgcctatgctccccgcccagaagttgtgaatcacccagcaacacgtactaaaccacattacgcagcgcatggtcagccctttacagcagaatagcgcccaggtactgacaatcgtgccgataaccggcaatagttcgacaggatgatggaacttcgcgaggccaattccgccagtcagcacaataaaaatcgccattacccataagctgcgcgtgcgtaaggtaatcaatgtacgaatggcattaaggatggcactggcaccagcgggataggtgcccagaagaaaaaaatgtacgccaataacggcgctatagacgctaagctgctttttgaagcgacgttcgtcacgattgaaaaatgttgtgataccaatcagaaaggcgatgacacccacgccctgggccagccaatacgcggtcatgataaatccttagcaggtatggaaaagcaaacggcgcttcacattatgaaacgccgttttttattaacaactcatttcgactttatagcgttacgccgcttttgaagatcgccagttcgcggaagtcgttacgctcgttacaggtttgcttaccgttggcaaactcaacgatggtgtcgataaattcttccagcaactgcggcatcgctttaccgtggatcaactgacccgcgtcaaagtcgatccagtgttttttcttcgccgccagttcactgttggtggcgattttcaccgtcggcacaaatccaccatacggcgtgccacgaccagtactgaacagcaccatatggcagcccgcacccgccagggcgctggtcgctacggcatcgttacccggcgcacttaacaagttcagccctggcgttttcagacgctcgccgtaacgcagcacgtcaaccacgacgctggaacccgctttctgggtacagccaagacttttgtcttccagcgtggtgataccgcccgctttgttccccgggcttgggttttcatagatcggctgatcatgggcaataaagtactgtttgaagtcgttgaccatggtgaccagtttttcaaacgttgcttcgtcgcggcaatggtccatcagcaactgctctgcgccaaacatctccggcacttcggtcagtacggtagtaccgccgttagcaatcacgtagtcagagaaacgccccagcatcgggttagcagtaataccagaaagaccgtcagaaccaccgcactccagaccaaacttcagttcgctgagtttgcctggctcgcgtttatcgttgcgcatcacgttatacagctgatgcaaatgctcgattccggcttcgatctcatcatcctgctgttggcagatcatgaaatgaacgcgttcaggatcgatatcgcccagcgtttcacggaatgcggcaacctggttgttttcacagcccagaccaatcaccagcactgcgcctgcgttcgggtggcgcaccatgttttgcagcatggtgcgggtattaatgtgatcgtcgcccagctgactgcagccgtaggtgtggctgaagaggaacacgccgtcagtaccttcggcgttgttggtctctttcagaaaacggttctggatctgccgcgcgatgccgttgacacagcccacggttggcaggatccacagctcattacgcaccccgacatcgccgttagcgcgacgatagatctgcacttcacgatctgccgcttgcgcaggcagatcctgaaaatcaggttgatagcgatactgatccagatcgctcagattcgtgcgcgtattgtgggcgtgaacgtgaacacctgccgcaatatccgccaatgcataaccaatcggcaggccatatttgatgacattggccccttttgcgatatccgttaacgcaaatttatgtccacgagcaacatcctggcgcagcgtaacagtctggttatcgacactgacttctgtgccttcagccaaatctgctaaagcgaccgcgacgttatccagcgcatggatcttgatgtattgcatatcaaccccagaccttagttcagttcaatggcgaagtagtcacgcgcattgttaaagcaaatatttttcaccatctcgcccagcaggttgatgtccgccggtgcttcgcccgcttccacccagcgaccgatcatctggcacagaatgcggcggaagtattcgtgacgggtgtaactcaggaagctacggctgtcagtcagcataccgacaaagcggctcagcagaccgagctgcgccagttgggtcatctgacgttccataccgtctttctgatcgttaaaccaccagccggaaccgaactgcattttgcccggcataccttcgccctggaagttaccgatcatggtgcccagcacttcgttatcgcgcgggttcaggcagtacagaatggttttcggcagcaggttttcttcattctgcttgctcagcaacttagacagctcttccgccatcggacggtcgttgatggagtcaaagcctacatccggccccagcagtttgaactgacgcaggttgttattacgcagcgcgccaatgtggtactgctgtacccagccgcgacgtgcatattcggcaccaaggaacaccagtaccgcagttttgaactgcgccacttcgtgctcgctcagggtttcgccagccagacggcgcgccagaatgctgtccagttccgcttcgttcgcttcagcaaacatcaccacatccagcgcgtggtcagacactttacagccgtgagcggcgaagtgatccagacgtttggtcagggcagtttgcaggtcagcaaagcggcgaatgtcggtatcggaaacttcgcccagcttcgccatgtagtcgttaaaggtcgcctgttcgatgttgaaggctttgtccggacgccagctcggcagcactttgatggtgaaagagccgtctttggcgatctctgcgtgatgctccagagaatcgatcgggtcatcggtggtgccgaccattttcacgttcatctgctgcatgatgccgcgcgcggagaagttatcctgcgccagcagttcgttacattcgttccagatttcatcggcagtactcggagaaagcaatttgccagtgataccaaacggacggcgcagttcgaggtgcgtccagtggtataacgggttgccgatagtgtgcggaacagtcgccgcccaggcgtcaaatttttcacggtcagacgcatcaccggtacacagacgctcggccacaccgttggtacgcatagcgcgccatttgtagtgatcgcctttcagccagatgtcatacaggtttttaaaacgatagtcttccgcaatctgctgcggcggcaaatggcaatggtaatcgaaaatcggctggtcttttgcgtagtcgtgatacagacggcgggcaaattcggtatctaacaggaaatcttcagtcataaacggagtcattttcgtcttcctctcaacgagtgagctagcttgcttatggtgcgatgctgacaaagttatcacaccaatttccagagtccgaagatattttcgtgagttagatcaataaacgtagttaaaaaaattactctcaaagtggtaaatctcgctgcaggccgcgccagtactggccttgctgtcgtcaggtaatgtccctacaaatattcccacatttgtgatggctctcaccttttaaagttgtatgacaagttatctttctgccgtcgcaaatcataagtcgacggaatgcaaattgccgattcattcatttgttagatgaatcgggttaaccggtacggaagccgaattagcacgaaactttcatggcaacgttcggggcgtgccggttttttttcggttacccggtcgtaactaacatcttcagcctctggcgggatgatggccgcgcttcctgcggatataacaaaacgatgaggttttacatgcgtaaaattaaagggttacgttggtatatgatcgcactggtgacgctcggcaccgtgcttggttacctgacgcgtaacactgtggcggcagctgcgccaactctgatggaagagttaaacatctccacccaacagtattcctatatcatcgcagcctattctgctgcttatacggtcatgcaaccggtagcaggttatgtactggatgtgctgggtacgaaaatcggttatgcaatgtttgctgtgctgtgggccgtgttctgtggtgcaaccgcgctggcaggtagctggggtggcctggctgttgctcgtggtgcggtcggtgccgcggaagcagcgatgatcccggcgggtctgaaagccagctccgaatggttcccggcgaaagagcgttccatcgcagtaggctactttaacgtaggttctagcattggtgcgatgattgcgccgccgctggtggtatgggcaatcgtaatgcacagctggcagatggcatttatcatctccggtgcattgagctttatctgggcgatggcatggctgattttctataaacatccgcgcgaccagaagcatctgaccgatgaagaacgcgactatattattaatggtcaggaagcccagcaccaggtgagcacggcgaagaaaatgtccgttggtcagatcctgcgtaaccgtcagttctggggtatcgcgctgccgcgtttcctggcagaaccggcctggggtacttttaacgcgtggatcccgctgttcatgtttaaagtttacggctttaacctgaaagagatcgcgatgttcgcctggatgccgatgctgtttgctgacctcggttgtatcctcggtggttacctgccgccgctgttccagcgttggtttggtgtgaacctgatcgtttcccgtaagatggtcgtaacgctgggtgcagtgctgatgattggcccgggtatgatcggcctgttcaccaacccgtatgtcgcaattatgctgctgtgtatcggtggttttgcccaccaggcactgtctggcgcgctgattacgctctcttccgatgtgtttggtcgtaacgaagtggcaacggcaaacggtttaaccgggatgtccgcatggctggcaagtacgctgtttgcgctggttgtcggtgcactggctgacaccatcggcttcagcccgctgttcgcagttctggcagtgttcgacctgttaggtgcgctggttatctggaccgtgttgcagaacaaaccggcgattgaggtggcgcaggaaacacataacgatcccgcaccgcaacattaacgtttcgtgtaagttttagtttcccttcaaagccgccttctcaggcggctttttcatcactgcgagtagagctaaactcgcaaaagtggtataacaaatatagtctgccgtatcatgcctggagcgcatatggaaatcactgaaccacgccgtttgtatcaacaacttgccgctgacctgaaagagcgcatcgaacagggcgtctatctggtgggtgataaactgcctgcagaacgctttattgccgatgaaaagaacgtcagccgtacggtagttcgtgaagccatcatcatgctggaagttgaaggctatgtcgaagtgcgtaaaggtagtggtattcatgtggtttccaaccagccgcgccatcagcaggcggctgacaataatatggaattcgccaattacggtccgtttgagttgcttcaggctcgccagctcatcgaaagtaatattgccgaattcgcggcaactcaggtaacgaaacaggacatcatgaaactgatggccattcaggaacaggcgcgcggcgaacaatgcttccgtgattccgagtgggatttgcagttccacattcaggtcgctctggcgacgcagaactccgccctggcggctatcgtggaaaaaatgtggacccagcgtagtcataacccgtactggaaaaaactgcacgaacacattgattcccgtaccgtcgataactggtgtgatgaccacgatcaaatcctcaaggcgctgattcgcaaagatcctcatgctgctaagctggcaatgtggcagcatctggaaaacaccaagatcatgttatttaacgaaaccagcgacgacttcgagttcaatgccgaccgctatctattcgccgaaaacccggtggtgcatctcgatacagccaccagcggcagtaaatgaaattcctgtccgacaggcgctgcaatgcgcctgtttgtctcgtcggtaagcgaaaagtataaagtgtcagcctgtgtaaatcctctcgccaccctcccctgcattcagcaaaatcagactccacggacatgtaattttgataacgaacaacgttgacctttgttacaattagattcaatttgaatttatgtttttgaatgctttcttatctcacgatttaacagggaatagttcaggctgtgttgatgtatcaaacccgcagaacataccaaaacagcaataacattgcggtagtgcatcttttaaaaccagcgtggcgttaaccgattcaccaggaataatgaatggaacttttgacccaattgctgcaagccctgtgggcgcaggattttgaaaccctggccaatccaagcatgattggcatgttgtattttgtcttgtttgtaattttgttccttgaaaacggcttgcttccggcggcctttttaccgggcgacagtttactggtattggtcggcgtgttgattgcgaaaggcgcgatgggctatccgcaaacgattctgctgctgaccgttgccgccagcctcggctgctgggtcagctatattcaggggcgatggctgggcaatacccgcaccgtacaaaactggctatctcatttacccgcgcattatcatcaacgcgcacaccatctttttcataaacacggtttaagcgcgctgttaattggtcgctttattgcgtttgtcagaacactgctgccgacgattgccgggttaagtgggctgaataacgcgcgctttcagtttttcaactggatgagcggtctgctgtgggtattgatcctgacaactctgggttacatgctcggcaaaacgccggtatttttaaagtacgaggaccagctgatgagttgcctgatgctgctcccggtggtgctgctggtgtttggcctggcaggttctctggtcgtgttatggaaaaagaaatatggaaatcgggggtaagggatgcaaatacctcgcatgagccttcgccagctagcctggtccggcgctgttttacttctggtcggcacgctgttgctggcctggtccgcggttcgccagcaagagtctacgctggcgattcgtgccgttcatcaaggcacaacgatgccagacggttttagtatctggcatcaccttgacgctcatggcattcctttcaaaagtatcacccccaaaaacgacactctgttaattacatttgactccagcgaccagagcgccgccgcaaaagcggtcctcgacagaacattgccccatggctacatcattgcgcagcaggacaataacagtcaggctatgcagtggctgacccggttacgggataactctcatcgcttcggataacttcctgttatccgaaacatatcactcactttggtgatttcaccgtaactgtctatgattaatgaggcggtggttaacactaccgcttcgttgtctggacaatcgttcctttgtaataggtccgaatcacaatggaaggttcaagaatgaaataccgcatcgctttagctgtttctctctttgctcttagtgccggtagttatgccactaccctgtgtcaggaaaaggagcaaaatatccttaaggagatcagctatgccgaaaaacaccaaaaccagaatcgtattgacggtctgaataaagccctgagtgaagtccgggccaactgtagtgatagccagctgcgtgccgatcatcagaagaaaatcgcaaagcagaaagatgaggtggcggaacgccagcaagatttagccgaggcgaagcaaaaaggcgatgccgataagattgccaaacgcgaacggaaactggcagaagcgcaggaagagctgaaaaagctggaagcgcgcgactactaactcacaatagtcactacttactcacctggagaaaactatgagcaaagaacacactacggaacatctgcgtgctgagttgaaatccctttccgatacgctggaagaggtgcttagcagttctggcgagaagagcaaagaagagttgagtaagattcgtagcaaagcggagcaggcactgaaacagagccgttatcgcctgggtgaaaccggtgatgccattgccaaacaaacccgtgtcgcggcggcgcgtgccgatgagtatgtgcgcgaaaatccgtggacgggcgtgggcattggcgctgcaatcggtgtagtgctcggcgttctgctgagccgtcgttaattatggcggacactcatcacgcacaagggcccggtaaaagcgttctgggcatcgggcagcgaattgtttctatcatggttgaaatggtagagacacgtctgcggctggcggtggtggagctggaagaggaaaaagcgaatctctttcaacttttactgatgctgggcctgacgatgcttttcgctgcatttggtcttatgagcctgatggtgctaattatttgggcggttgacccgcaatatcgcctgaatgcgatgattgccaccaccgtggtgttgctgctactggcactgattggcggtatctggacgctacgtaaaagccgtaagtctacgttgctgcgccatacacgccatgagttagcaaacgatcggcagctgctcgaggaggagtcccgtgagcagtaaagtcgaacgtgaacgacgtaaggcgcaactgcttagccagatccagcaacaacggctggatctttccgccagtcgtcgtgaatggctggagacaacaggcgcttacgatcgtcgctggaatatgctgctaagtctgcgctcctgggcgctggttggcagtagcgtgatggcgatctggacgattcgccatcctaatatgctggtccgctgggccagacgcggttttggcgtatggagcgcctggcgtctggttaaaacgaccctcaagcagcaacagcttcgcggttaacttccctctggccggagccattccggccttatccctcaaattttttgaagatttttgacagttttccttgctaacaatcatcattcaccacgtttatgattctctccatcgacagcaacgacgctaataccgcgccattgcacaaaaaaacaatcagcagcctgagtggcgcagtggagagtatgatgaaaaaattagaagatgttggtgtactggtagcgcgcattttaatgccgattctgtttattaccgctggctggggaaaaattactggctacgcgggtacccaacaatatatggaagcaatgggcgtcccgggttttatgctgccactggtgattctgcttgagtttggtggtggtctggcaatcctgttcggtttcctgactcgcaccacagccctgtttactgcgggctttacgctgctgacggcatttttatttcacagcaactttgctgaaggcgtcaacagcctgatgttcatgaaaaacctgacaatttctggcggattcctgctgctggcaattaccggtccgggcgcgtatagcatcgaccgcctgctgaataaaaagtggtaagcacgcgctatacttaacgataaaaaacgaggaggaagctcctcgtttttgctattggaggagagaaaaatgggtcaactgattgacggcgtctggcatgacacctggtacgataccaaatctaccggcggtaaatttcaacgtagtgcttccgcatttcgtaactggctcactgccgatggcgctcctggccccactggcacaggcggttttatcgcagagaaagatcgttatcatctctatgttagtctcgcctgcccgtgggcgcaccgcacgctgatcatgcgcaaactcaaaggactggaaccgtttatttccgtttccgtagtgaacccgctgatgctggaaaacggttggacctttgatgacagttttccgggagcaaccggagacacgctctatcaaaatgaatttctgtatcagctttatctccacgccgatccacactacagcggacgagttactgttcccgtgctgtgggacaaaaagaaccacaccatcgtcagcaacgaaagtgcagaaatcatccgcatgttcaataccgcgtttgatgcgctgggcgcgaaagcgggtgattactaccctccagccctgcaaacaaaaattgacgaacttaacggctggatttatgacaccgttaacaacggcgtgtataaagctggttttgccaccagccaggaagcttacgacgaggcggtggcgaaagtgtttgaaagcctggcacgactggagcagattttaggccagcatcgttacctgaccggcaaccagctaaccgaagccgatattcgcctgtggactacgctggtgcgttttgatccggtgtatgtgacccacttcaagtgtgataagcaccgcatcagcgattacctgaatctgtacggttttctgcgcgatatctaccagatgccggggatcgccgaaacagtcaatttcgatcatatccgtaatcattacttccgcagccataagaccatcaaccctacggggattattagtattggtccgtggcaggatctcgatgaaccgcatggacgagatgttcgcttcggttaaaaaaaggcaccttacgaggtgcctctgataattagctaagtgcatgttgttcatgtcggatgtggcatgaacgccttatctgacatacaaaacattgtacattcaatagattgcataacccgcgcagaccagataagcgtagcgcatctggcgattttgcgcttgtcatcagtcttagcgcgccttcacggcactttattaattccttgaacgaatatttactgccatttcattcacgtctattcttaatttgctgctttaaaaacaagtgattgagcaaaattgaggcaaaaatggactggtatctgaaagtactaaaaaattatgtcggtttccggggtcgtgcgcggcgcaaagagtactggatgtttattctggtcaacatcatctttacgttcgtgctggggctgctggataaaatgttaggctggcaacgcgctggtggcgaaggcatcctgacgacaatctacggtattctggtgtttttaccgtggtgggcggttcagttccgccgcctgcacgacaccgaccgcagcgcgtggtgggcactgctattcttaatcccgtttatcggctggcttattatcatcgtctttaactgccaggcgggtacgccaggcgaaaaccgctttggaccagatccaaaactggaaccttaaaacaaatctgctcgccggatgtctgactcatccggcttttatcattatgttgatgaatgaataatttactaatgtttatttaaaatatttcaatgtcgttatataaattacctataaaaaataaccatgtatttatcttaaatatcaaaacctttataacatccgaaaaagaaagatacgaatagcatttacacaatacccggaatagactttcgtcacttttaattaaagggatgtttttatgcagtggtatttgtccgtattaaaaaattatgttggtttctctggtcgcgcacgtcgtaaagagtactggatgtttactctgattaacgccatcgtcggcgctattatcaatgtcattcaattgattttaggtctggagcttccatatctgtctatgctttatttgctggcaaccttccttcccgtccttgcgcttgctatccgtcgcttacacgataccgaccgtagtggtgcctgggccttgctcttttttgttccgtttattggctggctcgtgcttctggtttttttctgcacagaaggtacttctggcagcaatcgttacggaaacgatccgaagtttggtagtaattaatcttagaattggggcgatatttcgcccctttttattaacaataataaatattattttccgttaaaaagtttgggaatttcccgcagacaccaggatttcgcttcccccatactgtcacgacgccaggccataataatatcgatctcgctggtgctttccgggctgacgacacgcaaccgcccttccgcaatatctttttcgaccataggatacggcatcgtcgccacgccaagccccgccagtaatgcctgacgtttatcttcaatcgtgctcaccgttaagcgcggctgtttgtccagcagctgtacggtcaacaccgggcgctcacgagcggtatccgccaccgcaattccacgatatttcacacgcgtcacttcagataacggttccggctcctgatgaatcgggtgatcaggcgcggcaacgtagacgttcattaacgtatagagcttgcggctgttgatctcgctgctggaacgaaaatgcatatccggcgcgataacaatatccgcccgcccctgctccagccgttcccacgcccccgccagcacttctgtgatgattgccagttgggtattggcttttgccgccagtttgtcgattaacgggaaaaaggcaggtgtcggtaccagcgcttcggtcacaatggtgagatgcgtttcccaaccgcgcgcgagagcttccgcatcagtagtcagtttatctgcggcttccagcaaaacgcgccctcgctccaacaacatcctcccgacattggtgaatttggtacgatggccgctgcggtcaaacagcaccacatccagctcttcttccagtttttgcatggtgtagctaagtgcggaaggcacgcgtcccagctcatccgccgccgccgcaaaactgccccggcgatcgatcgcatccataacccgtagtgcttccagcgttaatgccctttctttggccatttcgttctcattcaggaaatttgaacataccgggcagaatatctggctaacaatgtagcgtccagccccttaccataaaaggaagtaaagagaggtcaagaattatgattactacccgaactgccaggcagtgtggacaagcagactacggatggttgcaggcccggtatactttttcctttggacactacttcgacccgaaattgttaggctatgcctccctgcgtgtgcttaaccaggaagtgctggccccaggtgccgcctttcagccgcgaacctatcccaaagtcgatattttaaatgtgattctggatggagaagcagagtatcgcgatagcgaaggcaatcatgttcaggccagcgccggagaggcgttgctgctctctacccagccgggtgtcagctatagcgaacacaatctcagcaaagacaaaccgttaacgcgaatgcagctttggctggacgcctgcccgcagcgagagaatccgctgattcaaaagctggcgcttaatatgggcaagcagcaattaatcgccagcccagagggtgcgatgggaagcctgcaattacgccagcaagtgtggctgcaccatatcgtgctcgacaaaggcgaaagtgcgaatttccagttgcatgggccacgcgcgtatttgcaaagcattcacgggaaatttcatgcgcttacgcatcatgaagagaaagcggcgctgacctgcggtgatggggcgtttattcgtgacgaggctaacattacgctggttgccgattccccactgcgcgctttgctgatagatttgcctgtctaattgtttttacagggagatgatgatgagtaaaaaattggccaaaaagcgccagccggtgaagcccgtggtggcgaaagaacctgctcgcaccgccaaaaattttggctatgaagagatgttgagcgagctggaagctatcgtcgcggatgctgaaacgcgtttagccgaggatgaagctaccgcgtaaagacaggttgccggatgcggcgaaaacgccttatccggcctacaaaatccaacaacattaacgaattaaacaacccgtaggccggacaagatgcgccagcatcgcatccggcacgatccccaaaacctggcgtttatctggccttgctcgccataatctcgataatctgccgatccgtttgctgcatgctatggcttgctaacgcacacaggttggcaatgctctgctcaacatcatgcgccacaatcccttcattgccggtcacggcggtatcatccagcgccattaacaccgctttccacgcagcgctagcactggtgctaaccttcatcgcgcagctgttgctcgcaccatcgcaaatcatgccgctgacatcgccgatcatactgctgatcgccatgctgatggtttcataacgcccatccaccagccatgccatcccggcggcggcccccattgctgcggtcgttgcggcacacagcgcagacaaacgcggtaactggttatggatgtaaattgcgctcaaatggctaagcatcagcgcacgcgccagccgttcatcatccgctccgaagtgttctgctaccaccaccacaggcattgttgcggtaatcccctggttaccgctgccggagttactcatagccggaagcgtagcgccgcccatacgcgcatcggatgccgcgctggtacgaatcacaatggaactagagagatctttcgccagcaaaccgcgctcgcactgtttttccagcgtcgcgccaatatgcagcccccacttaccgctcaaaccttcctggcttaacgcacaatttagcttcgcggaatcgagaataaagcggatcgccgcaaacgggacttcattgacgaacttcaggatctcagccagcgtcgttctggaaagcaccgtcagcggagactcttgctcgccctctgccacacacgcctgctgggtaaacaccacaccatcgtgcgtctcgatatgcacaatgttggtatgcccgccgacgatggtgacacacgcccacttctcaccgttccagactttggcgcgactgaagaggatttcatcgcaaggttcctggatcttaacggagactttccccgccgccagcagtgctttggcatcggcaattgcctgcgctgttgcgtctttcagcacttccagcccggcgttggcatttccacctaacgcccccagcgccgccgcaatcggcagccccaccattcccgtgccgggaacggtgacgcccagaccgttcttcatcagatttgggctaacccaggcttctacacgttcaaccggaccttccagttctgccgcagcaaccgccgccgccagcgccagactaatcggttcagtacatcccagcgccggttttacttcctcctgaacggcgaggatgtaacgctgccataacggatttaaagtgctatcaaacatattaaaaaccttaaaatttcaggtaaatcaagaaaatgccaggaacggagaaacacacagcaacaaaccagtgacgataatcaggtacagagacatccctttgtatttgtgcaatgctggtactttgtaaaccagccacgccgggatcaggcaccctaccatgccgaaaatcgggctacagatagaggtgaagctcaacaccggtgcgttcagtacgatggcgctccaggccagcaaaatggcgaaaatcatgatgccgcgctgaacgagattttcgttaatcttctcggcaggcatcttgcgacgcaggatgttcattacgatcccttgcgttgcttcgcgaaagcctaaatagacgccaaagaatgcagtcatgacagcaaagatattgagaatgacgctgaccactttcacccacgctgcgccgtcaccgctaataaactgtgcggcaatcgccagcgcggaaatattctgctcataggcttttaccgcttcgtcatgtcccatcgccagcgtgaagctcacggcgtagaaaaagacggtgacaaacaaaatgccaaacgcgatattcattgcccgcaatgctttatgccgcgccacttcaatacttttttcccggctgcgataagagatcaccatcggacttaacgtctggataaacagaatgctcgtcagggtaaacggcagcgtaataatggcgtttttcaccagcagccccagcggcggtaggctaccgacgttatacagatgccacattcccaccatgctcacgcccagcgccgcgaccaccagcagcttggtcagcaccatgccggtgctaattttgaataacaatttctcgccgcgactggagatcgccaccagaatgcaaatcagtaccagaccataaaagggactgtcactcagcaacccttccgtcacgccgaaggtatgcaggtaggaagcactatcgttggtgatggcggtggaatagacgaacatccaaatcaccagcattacgaaatagagcgcacctaacaggatgccccagtttttacctaaataaccgctaatgacgctcgggtaatctttacattctggactttctgccagcgtattaataaacaatcgctgaaacagatacattgccgggtaaccaatcacgctactgagcaaaaatacccacaatcccatcaaaccgacctgcaccgggagaaaaacaatccccgcgccaatcgccatcccgatactcataatcacccagccggtgtcagtactgtcgaatttgatcgcttctcgccactcgctctcactcattccagcacgacccgccggggtcgaagcgtctgcaatgacgcctttattcgatgcaatttccataatttctcgctcaatattttgtagggcttattatttttttccgagccgcatcaaggcgatatgcggtctacgtttttgcaggcgagttattagaataaagaaatgatacgcgcgaggtcagagaaaatcttcacaatcaagactttgaaataacggagatggataagaattttctactaaattaatcgcaggagaatattcattctctatttgcggcagatcacaaaaaaaaggtgcacatttgtgcacccaaggatgaaagctgacagcaatgtcagccgcagaccactttaatggccagtcctccgcgacttgtttcgcggtatttatcgttcatatctttgccggtttcatacatcgtctcgatcactttatcgagactaacacgcggtgcgctggtgcggcgcatcgccatccgcgcggcgtttactgctttcacggcattaatggcattacgttcaatgcacgggatttgtacctgtccggcaaccggatcgcaggtcagcccaaggttatgctccatcgcgatttccgccgcattgcatacctgcgccggactgccgcccagtagttcagttaaccctgccgccgccatactacaggccacgccaatctccccctgacagccgacttccgcgccagagatggaggcgttcattttatacagcgcgccaatagcccccgcggccagaaaatagcgggcaatactccgctcgtttaccggacgacggaacttatcgtaataagccagtactgccggaataatgccgcacgcaccgttagtcggtgccgttaccacgcgcccgccagctgcgttttcttcactaaccgccagcgcgtacatgttgatccagtcgatgacattcatcggatcgttagagatgttatcgctggaaaccagctgacgacgcagcgctacggcacggcgcggcacattgagcggaccaggcagcacgccttcagtgttcatcccacgttcaataccgtcatgcatcacttgccagatacgggcaaaaccggcgtcaatttccgctttgctgcgcagcgctagctcgttgtgcatcatcagaccagatatagacaggccgttgtaatcacacattttcagcagttcacctgcactgtggaaatcgtaaggtacggacgtttcgacatcgtggctcaggccgaagtgttcttcttcgacaataaacccgccgccgacagagtaataggttttacttaatagctcttcctgtcccttccaggcagtgatccgcattccgttctcatggcgaggcaacatttcgggatggaagataatgttctttgctacaggaaaatcaacaatatgcgcaccagatgccactggcagccgcccgctgcgcgttactaactctataaatgcagggatctcatcaatgacaacatcctgcggactgtttcctgccagtcccatgatgatggcgacatccgtggcatggcctttgcccgtcagactcaagctcccgtacagatcgaccacaatatggctcgtcgcggttaataagccgctactttccagccgatcaataaaactttttccggcattcattggccccacggtatggctactggagggaccaatcccaattttgaaaatatcgaatgcactaatcatatccacaccctcggattgccgttcagtgaagtggagcggaacgaccttacgaccgtcccgctcacgaggctttacgcactacgtactgcgatggcttcaatttccagcttcacatctttcggcaaacgcgcgacctgcacacagctccgggtcggataggtcgcctgatgctcatcgaagaactgcttatagacttcgttgatggtggcaaaatcattcagatcggtgataaacacggtcatcttgatgatatcgcccacgctcagcccggcagcaaccacgatcgctttgacgttttcgaggcttaaacgcgcctgatcttgcacatcagccgggatctcaccggtctgtgggcaaaccggtatttgcccggaggtgaagaccatgctgcctaaatcaacgccctgaacataagggccgattgcgcctggggcacgttgcgtttcgataatctttttcatacatcctccggcgtcagagcgcctgggtaaaggtacgactaataacatcctgttgctgttcacgggtcagtgcgttgaagcgcacggcgtagccagagacacggattgtcaggttaggatatttttccgggtgctcgatggcatccagcagcatttcccgattcattacgttgacgttgaggtgttgaccgccttcgacatccgcttcgtggtggaaatacccatccagcaggccgacaaggttggttttacgtactggatcttctttgcccagcgccgcaggaacgatactgaaggtgtagctgatcccatctttggcgtaggtgaacggcagtttcgccacgctcgtcaaactggccacggcacctttgcggtcacgaccatgcatcgggttagcgcccggcgcgaacggtgttccggcgcgacgaccgtccggcgtattaccggttttctggccgtacaccacgttagaagtgatagtcagaatgctctgggtagggacggcgttgcgataggttggcagcgctttaattttcttcataaagcgttcaaccaggtcgcaggcaatgctgtctacgcgctcgtcgttgttgccgtactgcggatattcaccgtcgatttcaaagtccaccgccaggccgttttcgtcacggattggtttcacgcgggcatatttgatggcagacagggagtccgtcgccacgctcaggcccgcgatgccgcatgccatagtgcgatagacatcacgatcgtgcagcgccatcaggctagcttcgtagctgtacttgtcgtgcatgtagtgaatgatattcagcgcgctgatgtactgcaccgccagccagtccatgaagtgatcgaggctgtccatcactttgtcgtaatccagcacgtcgtccatcagcggtgctgttttcggcccgacctgaatcttcagcttctcgtccaccccgccgttaattgcgtagagcagcgttttcgccaggttagcgcgtgcaccaaagaactgcatttgcttaccaatcaccattgggctgacgcagcaggcaatcgcgtaatcgtcgctgttgaagtcagtacgcatcagatcgtcattttcatactgcaaggaagaggtgacgatgctcacctgcgcggcatattttttgaaggcaatcggtaattcttcgctccaaagaatggtcaggttaggttccggtgccggccccatagtgtgcagggtgtgcaaatagcggaaggagtttttggtcaccagcgtacgaccgtccagccccatcccgccgatcacttccgtcgcccagattgggtcgccggagaacaggctatcaaattccggtgtacgcaggaagcgtaccatacggatcttcatgatgaagtgatcgatcagttcctgtgcctgctgctcattgagtacgccagctttaaagtcgcgctcaatgtagatatcgaggaagcttgccgtgcggcccaggctcatcgcgccgccattttggcttttcactgccgccagataagcgaagtagagccactgcaccgcttcctgcgcattctgcgccgggcgagagatatcaaagccatatttcgccgccatttcctgaatctgcaacagcgcatgacgatgctctgccagctcctcacgcagacggatggtggcttccagatcctcgcctttttccagacgagactggagatcggcaaattgcagttcgcgttcacgtaccagataactgatgccatacagcgctacgcggcgatagtcaccgataatgcgcccacggccatagccatctggtaaaccggtcagcacgccagatttacggcagcgcagcatatccggactgtaaacatcaaatacgccctggttatgggttttacgcagatcggtaaacagatattcaaattcactgtccatttctcggccataggcgtggaaactacttttaatcatattaatgccaccgaacgggtgtagcgcacgtttcaacggcgcatccgtttgcaggccaacaattttttccagcggctggttaatatatcccgcatcatgagcggtaattgtggtggcaatattggtatcgaaatcaaccggcgcgtgggttgcattttcgatacggatgccttccattactttttcccacaattccgtggtggcaggcgtcgcttcggcgaggaaagattcatcgccttcatacggtgtatagttatgttgaataaaatcgcggacattaatttcgtttttccagtccgtacctttaaagccaagccatgcgtcggcgtacagcttatcgctggtatcaatatctaccttcatgaaaaataatctctctacaatacttcaactaaattatgcaaattctgcgggcgcgttaactttgcctaaatgaatggcatccaaagcaatcattttttcttcgttagtcggaataacggcacaaatgacacgcgcattttcactggaaacaattcgctcaccacaggagttagagcgattattcatttctgtatcaatctctaagcctaatacagccaaatgttccatgaccagacgacgaattaagctactattctctcctattccgccggtgaatataattccatccaggcgacgtaaactagctgcgtgtccggcaatatgacgggcaattcggtgaacaaaggttttaattgccagttgcgcgcgttcgtgaccttcatgccaggctttttccagaacacgtaaatcgctagaaagaccggaaatacctaataatccgctctctttattcactacgcgttccaggtcacccaggctctggttggtttggctggcgacccaggacatcgcaccaaagtcgacatcgccactgcgggtacccatcatcaagccttccagcggcgtcattcccatactggtatcaacactctgaccgttgcgaaccgcgcagatactcgcgccattgccaagatgcgccacaaccaggccggagtcatcttccgccagattcagcaggctatgtgcgcgctgggaaacatagcggtggctcgtgccgtggaaaccataacggcgtacacctaactcttcataatatttccacggcaggccgtataaataagcttccggagccatcgtctggtggaaactggtatcaaataccgccacctgagttacgcccggaaataattgctgcgcgctttcaataccacttaaattggcgtaattatgcaggggtgccagtggagaaacgcgacggatattatcaatgacttcatcggtaataatggcggactcggtaaaaatactgccgccgtgagcgatgcggtggccaattaaggccacactgtcatttaaattccgtttttccagttcaaatgcaattgccttcaatgcaccttcgtagctgtggtgagccagcggtgctggctctcccccatttacggataagaatgcattttcgctgttaataccgtcggcaataccactcattaatacttcacagtcgctggcatcgagcacggaaaacttaatgctagagctaccacagttaataaccaaaacaaccggaaattcattcatctcttttctcatcctgagttacggattaaaacagtttgtatacgatgttcaggatggtcagcagaccaatcacggtaacaaacacgttatccagacgaccacggtatttcgccagagacggcgctttacggatggcatacatcggcaacaggcacagcagggatgcgataatcggtgcgcccatggcttcaatcaggtcaaggatgttcgggttggcgtaggcaacaacccaggtggagcccatgatgaagatcatgctgatagtgttcagtttacccaggctcactttagttttgtcgcctttataaccaaacttcaggaccaggccattcagaccttccagcgttcccagatagtgaccgaagaaagatttgaagatagccacgagtgcgatgatggaagccgcatattccagtgtaatcgcgaacgttgttttggtaccggtcatggacgcaaagtggttagccagataagaaagcactggaatattctgcgctttggcttccgccatgttggccggagacagagtaaacaggcagctaaaggcaaagaacatcaccactgcaaccatcagcatgctggcacgagaaatgatttgggaacatttacgttcggtgaagtcgcgaccgaagtctttctcatactcttcacgcttagaaaccacgaaggaagagacgattgggctgaagttaaaggagaaaaccatgatggaaatccccagccagacagtgatcaggataccgtcatgaccggttaagctcaggctaccgaggtcaacctggtcgataactgcagagttccagtaagggatcaggctcaaagaaatcagcaccaggctggcgataaacggccataccaggtagctcatcactttaaccatcagatccttaccaaaccagatgacgaaagccatcagcagcaacaggaacagcgccacaaagccgcgattcagcggtgcaaagccgagctggttttcccagaacgtcataaaggtattggtaatagtaacgccataaatccacagcagtgggcaaatcgcgaagaagtacaggaacgtgataaccacgccgccagttttaccaaaatgctcttccaccgtttccgtaatgttgccggaagggttagagccagaaagacacagacgcgccagcgcccggtggcaataaaacgcgatggggtatgccaataccaacatcagaagaatcgggatcagtccgccaaaacctgcgcggatagggaagaacagcaccccggcgccgattgccgtaccaaacaagcctaacgtccatgtggtatcacttttacgccaggagctttgttttgtctggctggatacaatgctatcactagtactcatatcctatcctcaacgaattaattaagcgtcaacgaaaccggtgatttgagagacgcgagaaagatcgatattgccgccggaaataatactgacggtttttctgttttgaatatattggtctaatttaccgcttaataatgcagcacatgccagagcgcctgcgccttcggtgacgactttattgcgctgaattaaggcaatcatactgtttctgatttcgtcttcgctgaccagcacgatgtcatcgactaattcacgaacgatttcgtaagttaaattacccgggcgggagacatcacaaccatccgccagggtgccggtagttcggtgcgtggttatttctccggagtggaaagaagccgccatgccgtgaacgttttcagactgtacgccaataacacgaatggtcgggttaatagatttaattgccaccgcaataccagcaattaaaccgccaccaccaattggcacaatcacgttatcgacatcatagagatcttccataatttccagaccaatcgttccctggccagcaatcactttcggatcatcgtaaggtgggataaaaatacggccttccatttcgacaatttcgctcactttagcgatagtgtcgttgaagttatcaccatgcagaacgacttctgcggagtagtcgcacgttgccgctactttggattttggcgcaccttttggcatcaccactttaccgtcgatacccagcatcgcgcaggagagggaaaccccttgcgcatggttgcccgcagaacaggccaccacgcctttgcgtttttccgcatcggtcagactacttaatttattaaatgcgccacgaattttaaaactacccgtacgctgcatattttcaaacttcaggaatatttcacctttgcaacgttcactaaaatagttggagcgaggcatgcctgttttataaattcgcccagccagtcgttgtttcgcttcaataatgtcatcaatagcaaccggcagatcgtatgtaatatgcattataaaacctcttcgcctgaattaaatatgtaggtaaccgtaaccgacacctgcaagacagacaggtggattatttatgtttaaataaaaacaaataattaaccaacttctattaattgccttcgtctacacccattataagaactatactctttggctaattccaccaaaacgcttgctgcttttttaatacgataatttttgctccataccgcggcatattgtgccacaggtaatgtttcttcaaccggaatagtaataaattgattagaaccaaaaggactcgtcatatcacaaggaattacagttaagaaatcagcattgagaacaagattataaattgtcacgacactgtcggttttaacgatgttttcaatactgatgccatttctttgtaacgtagtaagcagttcgctgtagtaccccatattagtttgtggcaacacccactgttcgttcttcaagctctccagcgtggtggtgccggtgcatgttcgggacttactggctaccagcacaaactcggactcgaacagcggctcaacatgtaaatcctgaagcttcatttctgcacttaacgtaccaatcgcaaaatccagtcgaccgtcgcggattgccggtaagaagctagacagttgcgcttcatacatagaaacctgcgctttcgggaacacctctttgaacttgttgatcatcccactcataaaagtaaaaccaatcaaactaggaaaaccaaaactgacttccaccaccgcctcagaagacataccgcttatctcattaaccatatttttcatttcacgggtaatggattcggaacgggagagtaacaattgaccggcaggtgttaatgttacaccggtatttttccgcaccactaattccacaccaaaataatcttcaatatcgttaatgattttactgacggccggttgagttaaccctaattcttttgcagcgctgccgatagaaccacttctaatgacttcctgaaagactaccaggtgctgcgttttcggaagaagaatagtgctcataacgacctacgttaattacctcattgacggcatgaagtgtatcaaaatgaaatgaacaggatatgtgcgaccactcacaaattaactttcaatactttccagagtatcgttattacaattaaatacctttaaatatcaacaagttaaagtataaaaatcagcataaaccctgatttttgtcaaaaaaaatgacggggataaccatattttatggcgataacatcattcgttatgtggttaatacaaaaaaggggctgagaccatatttcaagcaattaccggataattaccaggcaaaatttgagttaaatttaatgagcaagttcagtaattttattataaataaaccatttagtgtgataaataatgcggcatgtcacatttttagtcgctatttgttggagaacaaacatttattttatcaatattttaaaattagcaatacatgtattgatcatctcgaacaattgattaacgtcaactttttctcttctgacaggacgagtttttgtgaatgcaatcgttttccataaattcttctcccctcataggcgacgaatagcattttgtgttgaggattacaaaacgaataattgctgatcgccgcgataaggtcagacaaagacaacaagggaaattttcacagagcttttgatcggcgtaggccacagaatgttgcttcgtttactgtaacgccgggtaaatgagcgttttttgatagtgcgaaagaaccctgcgaggaaaataagcatctattattgtttgtcatgatgacaaggcaggcatcaatgaaaggcttcccaattgcgcatatttttcaccctagtatcccgccaatgcacgcagtggttaacaatcacaatagaaatattgattattggacggtaaaaagaaagtttgcagaaattgtctccaccaatgacgttaataaaatttacagtataagtaatgaactgcggagagtattatctgcaataactgcattgaatttctatcatggcgatgttccttctgtcatgatccgaatccaaccggaaaatatgagtccattcattatagatatttctacaggagaacatgatgattatatcatacaaacattagatgtaggcacttttgcaccttttggtgaacaatgtacttgcagtgccgtcaataaaaaagagctggaatgtattaaggagacgatttctaagtattgtgcaaaattcacccgaaaagaagccatcttaaccccccttgtgcactttaataaaaccagcattactagtgattgttggcaaattctcttttttagtcccgatcattttaataatgatttttattgattatttataaaggataaaataatgttccctgttagtagtattggtaatgatattagtagtgatttagtccgtcgaaaaatgaatgaccttcctgaaagcccaacaggaaataacctcgaagcactagcaccaggtatagaaaaactaaaacagacctctattgaaatggtcactttacttaacacgttacaacctggtggaaaatgcattatcactggtgattttcaaaaagaattagcgtacttacaaaatgtaattctttataatgtcagctctcttcgtctggattttttaggttataacgcccaaattattcaacgaagcgacaatacttgtgaacttaccattaatgaaccgttaaaaaaccaggaaatatccacaggtaatatcaatattaattgcccattaaaagatatttacaatgaaatcaggaggttaaacgtaatttttagttgtgggactggagatatcgttgatctatcctctctggacttacgtaatgtcgatttagattattatgatttcacagataaacatatggctaatactattttaaatccttttaaattgaatagtacaaattttactaatgccaacatgtttcaggttaattttgttagtagtacacaaaacgccacaatctcctgggattatttactaaaaataacgcctgttttaataagcattagcgatatgtattctgaagaaaaaatcaagtttgtcgaaagttgtttaaatgagcctggagacattaccgaagaacaattaaaaattatgagatttgcaattataaaatctataccaagggcaactcttacagataaattagaaaatgaattaacaaaagaaatatataaaagcagtagcaaaatcatcaattgcttgaacagaattaaattaacagagatgaaagaattcagtagtgaaaaaatatatgattacatcgatataatcattgaagattatgaaaataccaaagaaaatgcttatctggtcgtcccccaaattaattatactatggatttaaacatagaagactctagcagtgaagagttacttagtgataataccctcgagaaagacgaaaattctccggacaatggctttgaggtcggggaatataacacatatgaagcatataacagtgagaagcaatattttaccagagaggactatacgtatgattacgaccttttaaatgcaatataaacttaataacttcttacaaagtctattattaataccgtagatatttattcatcttaccctgtgcaccaaaagcaaaaactcactgacgcgggtttgaaactgatggcaaccgcaaaaatgcctgatgcgctacgcttatcaggcctacgccatctctgcaatatattgaatttgcgtgcttttgtaggcaggataaggcgttcacgccgcatccggcatgaataaagcgcactcaacaatctgaaacccgccggaacggtttattacgtacatcaggtaaaactgaccgataagccgctttcttttgggtatagtgtcgtggacagtcattcatctttctgcccctccaaaagtaaaaacccgccgaagcgggtttttacgtaaaacaggtgaaactgaccgataagccgctttcttttgggtatagtgtcgtggacagtcattcatctttctgcccctccaaaagcaaaaacccgccgaagcgggtttttacgtaaaccaggtgaaactgaccgataagccgctttcttttgggtatagcgtcgtggacagtcattcatctttctgcccctccaaaagcaaaaacccgccgaagcgggtttttacgtaaatcaggtgaaactgaccgataagccgggttctgtcgtggacagtcattcatctaggccagcaatcgctcactggctcaagcagcctacccgggttcagtacgggccgtaccttatgaacccctatttggccttgctccgggtggagtttaccgtgccacggactgttaccagccgcgcggtgcgctcttaccgcaccctttcacccttacctgatcccgcttgcgcgggccatcggcggtttgctctctgttgcactggtcgtgggtttcccccccaggcgttacctggcaccctgccctatggagcccggactttcctcccctccgcccgtctcccccgaagaggacgacgacgaagcggcgactgtctggtcagcttcggcgcgcagtatagagggtttgcgcgcccttgtcaccccgcgttgcgcattccaatcgccagtgtcgcggcgatattacgactagcacggcagatattgtcataagccccgcggaatgcttcgtccaacgtacctatgctggtcaatacgctgaagaccgcatcaatgccatgctgatgtacaacgccaacatcatcggtcaggctacccgcaatgccaatcaccggtttatggtacttcttcgccacgtttgcgacaccaatcggtaccttcccgtgaatactctggctgtcaatacgcccttcaccggtgatcaccagcgtacaatcgtgaatatgttcctccagattcagcgccgtagtgacgatttcaataccacttttcagttccgcaccaagaaacgccattagcgccgcgcccataccacccgcagctcctgcaccggggacatctttcacatcaacatgcagcgcttttttaatgacctcggcatagtgagagaggttattgtccagctcaacaatcatcgcttcactggctcccttttgtgggccaaagatgcggcttgcgccgttatcgcccaccagcggattggtgacatcacaagcgacgcgaatgacgcaatcttttaagcgcggatcgaggccggaaatatcaatatcattcagagtattaagactaccgccgccaaaaccaatttcattgccgttggcgtcgcataatttcgcccccagcgcctgtaccatgcctgcgccgccatcatttgtagcgctgccgccaatgccgataataatgtttgtcgcaccgctctccagcgcctgcaggattaactcgcctgtgccgcgactagtggtcacgagtggatcgcgtttttccgcaggtaccagctccagcccactggccgccgccatttcaataaacgcggttttgccatcgccggagatcccccaactggcattcactttctcgcccagcggccctgtaacccaggcgtgacgttcagccccctgggtggctgcaatcatcgcttccaccgttccttcgccaccgtcggcaaccggaacagaaacgtactgtgcatcaggaaaaatttcccgaaatcctttttctatcgcctgcgcaacctcgctggcagataaactttctttataagagtctggggcgattacgattttcatacctatgcctgttaccacatgacgccggagggcgtttctcttattcggcctggattccaggcccggattgcaatacgccatccgggcacgacgtcattaacgagtaacttcgactttcgccagtttttcgtagtagcacgccagggcgctatgatccgccgttcctaaaccatctgctcgcagtgcctgcatcatctccataaccgcagctgtgagcggcagttgtgcgccgacgccgtgagaagtatccagcgcattcgccagatccttaatatgcagatcaatacggaagcccggcttgaagttgcggtccatcaccatcggcgctttggcatccagcacggtactgcccgccagtccaccgcgaattgcctgataaaccaggtccgggttaacgcccgctttagttgccagcgttaacgcttcactcatcgcggcaatattcagcgccacaatgacctgatttgccagtttggtgacgttacctgcaccgatttccccggtatgcaccacggaacccgccatcgctttcatcaaatcatagtatttgtcgaaaatagccttgtcgccgcccaccatcacactcagcgtaccgtcgatggctttcggttcaccgccgctcaccggagcatccagcatatcaatgcctttcgctttcagcgcttcgctgatttcacggcttgccagcggtgcgatagaactcatatcgatcaataccgtacctggcttcgcgccttcaataatgccattctcacccagcgccacctctttcacatgaggggagtttggcagcatggttatgatgacgtcgcactgttcagcgatcgctttagccgtagacgctgtttctgcacctgcagcaatcacgtcagcaatagcttctgggttacggtcagcaaccaccaggctgtaacctgctttcagaaggtttttactcattggtttacccataatccccaggccaataaaaccaactttcatagtcatatcaatcatctctcttgttgcggtggtggttattttttaaaggtatcagccagtttctgagtggcagagcggaagacgccgagatcgctgccgacagccacaaacgtcgcgccccattccagataacgacgcgcatcggcttcgaccggcgcgaggataccgctgggtttgccgtgcgcgctggcacggttaaaaatgtgctgaattgctttttgtacatccgggtgacttgcattgccgagatggcctaatgccgcggccagatcgctggggccgacgaagatgccgtctacgccttcggtagcggcaatggcatcgacgttatctacgccctgctgactttctatctggaccagaatagtgatgttcttgttgctctgagcgaaataatccgccacggtgccaaacatattggcgcggtgagaaacggagacgccgcgaatgccttccggtgggtaacgggtacttgccaccgccagctctgcttcctcttttgtttctacaaaaggaatcaggaagttatagaaaccgatatccagaagacgcttaataattaccggctcgttggtcggcactcgcactactggcgcgctggcgctgcctttcaaggccattaactgcggaataaacgtggagatatcgtttggcgcatgttcgccatccagcaccagccagtcaaacccagccaaaccaagaacttcagtgctaatcgggttagagagtgcactccagcaaccaatttgtacctgtttcgcagccagtgcggctttgaatttattcgggaaaacatcgttattcatcgcttatacctttgcttatttctgcaattccatacgtttaatgtcgccaactacgaagaggtagcagaccatcgccatcagcgcactacatcccacgaaaaccagtgctgcattgaaggagtgcagttcacttaccaggtagccaatcaccagtggagtgacaatggaggcaacattgccaaagacgttaaagacgccgccgcagaggccaacaatctctttcggcgcggtgtcagaaatcaccggccagcccagcgcaccaaatcctttgccaaagaaagccagcgccatcagcatgaccaccagcgtggtgttgttggtgtagttacataagatgatggtggaagccagcaacattcccagcacaatcggtagcttacgtgccagggtcagggataaaccgcgtttgatcagataatcgctgaagacacctcccagcacgccgcccgcaaaaccacacagtgctggaatgctggcgaccagacccactttcagaatgctcatgcctttttcctgcaccagataaatcgggaaccaggtgaggaagaaccaggtgatggtgttgataaaatattgtccgaaaaatacgcccagcatcatgcggttagagagcaattgcttgatgtaatgcagtttgggtccgcttgctgccgcactgcccggctttttgtggtccatatcgaccaccgcgccattttcagagataaacttcagctcttccgcagacatacgtgggtgatctgtcgggttatgaatcaacttgatccacagcgccgtcagcacaaaaccaatcacccccataacggtaaagacgtgctcccagccccaggcgaaagtcagccagccaagcagcgggctaaagagcgccaggctgaaatattgcgcgctgttaaagatggcggaggcagtaccacgttctttcgtcgggaaccaggcggcgacaattcgggcgttcgccgggaaacttggcgcttcgctgaagccgagcataaagcgcataaagaacatggagatccctgcccaggccagcgggaacatatcaacaaagccttgcaggaaggtgaataggctccagaaaaagaggctgtaggtgtaaacttttttgctgccaaacttatcaagcagccagccgccggggatttgcatcagcaagtaggcccagccaaaagcggagaagatgtaacccatgctaaccgcacttaactgcaactcttttgccacttcggtaccagcaatagacagcgttgcacgatcggcgtagttaacggcggtaacaataaaaataatcagtaatattaaatagcgggtatgcacgcctttctttttttcgtcaacggtgtccagaatcattttatttacctcgggtacttatgctgatttttattattatggggaaggtgttatttatgagtttcatttatgccgtaacgacaatgaactcgggaattagtataagcagcgcgagaataataatcattgtgcaaatgctaatttaattaatactatttaaatattattttgagcatatgcacataaggttgcgcgctaaagcacagatttgcgctttaccttaccgggcggcactgcaatccctgaaatgattgacattgatcacatttctgcgtttaaactcctgacattcttatttcacccaatgaagtcatttatttttaaatgagaccaggtcctcattttaataacccctggctggagaatattgcacaatggccaacatcgaaatcagacaagaaacgccaactgcgttttatataaaagttcacgacacagataatgtggcaattattgttaatgataatggcctgaaagcaggaacgcgttttccggatgggctggaattaattgaacatattccccaggggcataaagtcgcattgctggacattccggctaatggtgaaattattcgttatggcgaagtgattggttacgccgtgcgtgcaatcccacgcggaagctggatcgacgaaagcatggttgtactaccggaagcgccgccgttacacacgctgccactggcaaccaaagtcccggaacccttaccgccgctggaaggatacacctttgagggctatcgcaatgccgatggcagcgtgggcaccaaaaacctgctcggtatcaccaccagcgtccactgtgtggcaggcgtggtggactatgtagtaaaaatcattgaacgcgatctgctaccgaaatacccgaacgtcgatggcgtggtggggctgaatcatttgtacggttgtggcgtggcgattaacgcaccggcggcagttgtacctatccgtaccattcacaatattagcctgaatcctaactttggcggcgaagtaatggtgattggcctgggttgtgaaaagttgcagcctgagcgcctgctgactggaacggatgatgtgcaagctattccagtagaaagcgccagcattgtcagtttgcaggatgaaaagcatgtcggttttcagtccatggtcgaggatattttgcagatcgccgaacgccatctacaaaaactgaatcaacggcagcgagaaacctgcccggctagtgaactggtcgttggtatgcagtgcggtggcagcgatgcgttttctggtgtaacggcaaacccggcggttggctatgcgtctgatctactggtgcgctgcggcgcaacggtgatgtttagtgaagtaacggaagtgcgtgacgcgatccatctgctgacaccacgcgcagtgaacgaagaggtcggcaaacggctgctggaggagatggagtggtacgataactatctcaatatgggaaaaaccgaccgcagcgccaaccctagcccgggcaacaagaaaggcggtctggcaaacgtggtagagaaggcactcggctccattgctaaaagcggtaaaagcgcaattgttgaagtgctgagccccggtcaacgcccgactaaacgcggattaatttacgccgcgacgccagccagcgattttgtctgtggcacgcaacaggtggctagcggtatcacagtgcaagtgtttacgaccggtcgtggtacgccgtacggcctgatggcggtacccgtcattaaaatggcaacccgcaccgagctggcgaaccgctggtttgatttaatggatattaatgcgggcaccatcgctaccggcgaagaaactattgaagaggtgggctggaagttgttccactttattctcgacgtcgccagcgggaagaagaaaaccttcagcgatcaatgggggctgcataaccagctggcggtgtttaacccggcaccggtgacctgatttcttttggaacgtccctcgcaaaacatggccttagtgccatgtttttattgtttaaagcccccacgtccattaataatgcatttgcattaccttagttcaagcttataatttgagcagaaaacaggctgtaaaaggacagtgaatcatgcccgctaatgctcgctctcacgctgtactgaccactgaaagtaaggtcacgatacgcggacaaacaactatccccgcgccagtgcgtgaggccttaaaactgaagccaggccaggacagcattcattacgaaattctgcctggtgggcaagtatttatgtgccgactgggagatgaacaggaggatcatactatgaatgcatttttgcgttttctggatgcagatatccagaacaacccgcaaaaaactcgtccattcaacattcaacaaggaaagaaacttgtcgctggcatggacgtcaacattgatgatgagattggcgacgacgaataatggattttccacaaagggttaatggttgggcgctatatgctcatccctgttttcaggaaacctacgacgctttagttgccgaagtcgagacattaaagggaaaagatcctgaaaattatcagagaaaagccgccacaaagttattggcggtagtccataaagtgattgaggagcatatcacggtcaatccaagtagtccggcattccgtcatggcaagagcttaggctctgggaaaaataaagactggagtcgggtaaaatttggtgctggtcgttatcgtctcttctttcgttatagtgaaaaagagaaagtcatcattctgggatggatgaacgatgaaaacactctgcgcacctacggtaaaaaaacagatgcctataccgtattcagcaaaatgttaaaaagaggacatcctcctgccgactgggaaaccctcacccgagaaacagaagaaacccattgatggtgttcacaatgcccgccgaacgcattcgtgttgaccagcgggcatcctttctcactccccgaccagaatcacttcaaccccagcctttcgcagtccttccaggctatccgcaggaatgccttcatcaacaatgatcatgtcgatacgttgagtatcaatgatcttatgtaaactggaacgattgaacttactggaatcggtgaccacgatgatccgttccgcaacttcgcacatccgacggtttaaacgagcttcatcttcattatgtgtgctgacgccgcgctccagatcgatcgcatctacaccaagaaacagcatatcgaagtggtaattttgcaggctttgctcagcctgatcgccgtaaaaagattggctctgacggcgcaaatgcccgccggtcatcagcagctcaacgccttccgcttccagcaacgcattagccacgttcataccgttggtcatcgcaattacgtcagtgtgcttgcgcatcagacgagcaatctcaaaagtggtggtcccggaatcgaggataacccgatgacctggctgaatcaactcaacggcagctttcgcaacgctgcgtttcatcgcggtgttcagtgcgcttttatcttccacacttggctcgacactcggcgtcgtgctatcgcagatcaacgcgccaccataggcacgcacagcgatcccctgcttttccagaaacgccagatcgttgcggatcgtcacagtagatacgccatacaatgcgctcagatcgttaacctgcacactcccttgctgtcgcagacgctgaatgatctgttctcgtcgctcgctggtgccagtcactcgcttctcaccactagcgtcggtattactcatagtaagtcctttcgtaaaactttcgtttcatttcgttttgcctattaacgcctttctattaagcaaatgcaagcccaccttgcccattgacgcaagctactctcgtttcagtgactttcattatgtttcttttgtgaatcagatcagaaaaccattatctttcgttttatttttatctcaccatgacgcagtatcaactgaaacaaaacgaaagattaatatcgcagtaatctgaactggagaggaaagtgaaacatctgacagaaatggtgagacagcacaaagcgggcaaaacaaatggaatttatgccgtttgttccgcacatccgctggtgctggaagctgcaatccgctacgccagtgcaaaccaaacgccgttactgattgaagcaacctccaatcaggtagaccagttcggcggttataccggaatgacgcccgccgattttcgcggctttgtttgtcagctcgccgacagcttgaatttcccgcaggatgcgttgattctgggtggtgaccatctggggccaaaccgctggcaaaacctgccggccgctcaggcaatggccaatgccgatgatttgattaaaagctacgttgcggcaggattcaaaaaaatccaccttgattgcagcatgtcctgtcaggacgatccgattcccttaactgatgacatcgtggctgaacgcgccgcccgtctggcgaaagtggcggaagaaacctgtcttgaacactttggcgaagccgatctggagtatgtcattggtaccgaagtgccggtacctggcggcgcgcatgaaaccttaagcgagctggcggtcaccacgccggatgccgcccgcgccacgctggaagcccatcgtcacgcctttgaaaagcaaggtttgaatgccatctggccacgcatcattgccctggtggttcaacccggcgtcgaattcgatcacaccaacgttattgattatcagcccgccaaagcgagcgccttaagccagatggtcgaaaactacgaaacgctgattttcgaagcgcactctaccgattatcaaacgccgcaaagcctgcgccagctggtgattgaccactttgccattctgaaagttggcccagcgctgaccttcgccctgcgtgaagctctgttctctctggcggcgattgaagaagaactggtgccagcgaaagcctgttctggtctgcgtcaggtgctggaagacgtgatgctcgaccgcccggaatactggcaaagccactaccacggtgacggcaacgcgcgtcgtctggcgcgtggttatagctacagcgatcgcgtgcgctattactggccggacagccagattgatgacgctttcgctcatctggtacgtaatctggcggatagtccaattccgctgccgctgatcagccagtatctgccgctgcagtacgtgaaagttcgctccggcgagctgcagccaacgccacgggaactcattatcaaccatattcaggacatcctggcgcagtaccacacagcctgtgaaggccaataagcaaaacaaagaggaacacgctatgccaaatattgttttaagccggattgatgaacgcttgattcacggtcaggtcggcgttcaatgggtcggatttgcgggggcaaatctggtgctggtagccaacgatgaggttgccgaagatccggtacaacaaaacctgatggaaatggtactggcagaagggatcgccgtacgtttctggacgctgcaaaaagttatcgacaacattcatcgcgccgccgatcgacagaaaatcctgctggtttgtaaaacacccgccgatttcctgacgctggtgaaaggtggcgttccggtgaatcgcattaacgttggcaatatgcactacgccaatggcaaacaacaaatcgccaaaacggtttctgtggatgcgggcgatatcgcagcatttaacgacctgaaaaccgctggggtggaatgcttcgttcagggcgtcccgacagagcctgctgtggacctctttaaattactttgagggattcatcatggaaatcagcctgttgcaggcatttgcgttgggcattatcgcctttatcgctggcctggatatgtttaacggcctaacccatatgcaccgcccggtggtcctcggcccgttggtcgggctggtacttggcgatctgcataccggaattttaaccggcggtacgctggaactggtgtggatggggctggccccgctggcgggcgcacagccgcctaacgtgattatcggtactatcgtcggcacggcgtttgccattactactggcgtgaaacccgatgtcgcagtaggtgtcgccgtacctttcgctgtcgcagtacagatggggattaccttcctgttcagcgtgatgtccggcgtgatgtctcgctgcgacctggcaacaaacccgcgccgcatttgatgctggtgccgacggcctggtgcattgctataacgggatgacaggtttacatcaccgcgaaccgggaatggttggcgcgggattaacggacaagcgcgcctggctggaactgatagccgatggtcatcatgtgcatccggcggcaatgagcctgtgttgttgctgtgcgaaagagagaatcgtactgatcaccgacgcgatgcaggcagctgggatgccggatggtcgctatacgttatgtggtgaagaagtgcagatgcacggtggcgttgtccgtaccgcgtctggtgggctggcgggcagtacgctgtctgttgatgcggcagtgcgcaatatggtcgagttgacgggcgtaacgcctgcggaagccatccatatggcgagcctgcatccggcgcgaatgctgggtgttgatggtgttctgggaagccttaaaccgggcaaacgcgccagcgtcgttgcgctggatagcgggctacatgtgcaacaaatctggattcagggtcaattagctagcttttgatagtttgctcctttattgggccttcacttcccccgtaaggcctttctttttctttcgttttgatctgtgcagcggtgtcggatgcgacgctaacgcgtcttatccgacctacagttggtgaccgcaaggccggataaagcgtttgcgccgcatccagcaatcccttttgcttcctttatcttttctttcaacgatcacaaatttcgttttatttcttttttctccattgaactttcagtttcttttctatagattttaatcaacgaaagacatcaccaagtgaaatgaaacgaaaggcaagtgaaagcgacaacgcccgacgtcaagttcatcagactaaggattgagttatgccagaaaattacacccctgctgccgccgcaaccggtacatggactgaagaagagatccgccatcagcctcgcgcatggatccgtagtctcaccaacatcgacgcgctacgttccgcgctcaataacttccttgaaccgttactgcgcaaagagaatctgcggatcatcctgaccggagccggaacgagcgcatttatcggtgacatcatcgcgccgtggctcgccagccataccggtaaaaacttcagcgccgtaccgaccaccgatctggtcaccaatccgatggactacctgaacccagctcatccgctgctgttgatctccttcggtcgatccggcaacagcccggaaagcgtcgcagccgtggaactggcaaatcaatttgtaccggaatgctatcacctgccgatcacctgcaacgaagcgggcgctctttaccaaaacgcgatcaacagcgataacgcgtttgccctgctgatgcccgcagaaacgcacgatcgcggctttgcgatgaccagcagcattaccaccatgatggccagctgcctcgcggttttcgcacctgagacgatcaacagccaaaccttccgcgacgtggcggatcgttgccaggcgatcctgaccagtctgggcgatttcagcgaaggtgtgtttggttacgcaccgtggaaacggatcgtttatctcggtagcggtggcttacagggcgcagcacgcgagagcgcgctgaaagtgctggaactgacggcgggtaaactggcggccttttatgattctccaaccggattccgtcatggaccaaaaagcctggtcgatgacgaaacgctggtggtggtatttgtctccagccacccttacacccgtcagtatgatcttgatctgctggctgaacttcgccgtgacaaccaggcaatgcgtgtaatcgccatcgccgcggaaagcagcgacatcgtcgctgccggtccacatatcatcctgccaccgagtcgtcactttatcgacgttgagcaggcattttgcttcctgatgtacgcccagacgtttgcactgatgcagagcctgcacatgggcaatacgccggataccccaagtgccagtggcaccgttaaccgcgtggtgcaaggcgtaatcattcatccgtggcaggcataagaggatcgcattatgagcattatctccactaaatatctgttacaggacgcccaggccaatggctacgcggtgcctgcttttaacattcataacgccgagacgatccaagcgatcctcgaagtgtgcagtgaaatgcgaagcccggtgatcctcgccggaacgccggggacctttaaacacatcgcgctggaagagatctacgccctgtgtagcgcctattccacaacctacaacatgccactggcgctgcatctcgaccaccacgaaagcctggatgatattcgccgtaaagtccacgcaggtgtgcgcagtgcgatgatcgacggcagccacttcccgtttgccgagaacgtgaagctggtgaaaagcgttgttgacttctgccacagtcaagattgcagcgtggaagcagaactgggccgcctgggcggtgttgaagatgacatgagcgttgacgccgaaagtgcattcctgaccgatccacaagaagctaaacgctttgtcgaactgactggcgtcgacagcctggcggtagcgattggtacggcgcacggcttatacagcaaaacgccgaagattgatttccagcggctggcggaaattcgtgaagtggtggatgttcctctggtgctgcatggtgccagcgatgttccggatgaatttgtccgtcgcactattgaacttggcgtcacaaaagtgaacgttgccacagaattaaaaatagccttcgctggcgcggttaaagcctggtttgcggaaaatccgcagggtaacgatcctcgttattatatgcgcgtcggaatggatgcgatgaaagaagttgtcagaaataaaattaatgtctgtggtagtgcgaatcgaattagtgcataatcattagttttttatgatttatcccaatgtacttcccgattaatatcggggagtgccttaatggaaaaggagataactaaaccttaataaatacatcactacaatatcgcaacaataatatatttaaaaaaattatattattcaactttatggtgaggattacacaatgaccagtccaaatattctcttaacccgtattgataaccgtctggttcacggtcaggttggcgtgacctggacatccaccatcggtgcaaatctgctggtagtcgtggatgatgttgtcgctaacgatgatattcaacagaaattaatgggtattaccgcggaaacctacggctttggcattcgtttctttactatcgaaaaaaccattaacgtcatcggcaaagctgcaccacatcagaagatcttcctgatttgccgtacgccacaaacggtacgtaaattggtagaaggtggtattgacctgaaagatgtcaacgtcggcaatatgcatttcagcgaagggaaaaagcaaatcagcagtaaagtttatgtcgatgaccaggatctcacggacttacgttttattaaacaacgtggcgtgaatgttttcattcaggacgtccctggcgatcaaaaagaacaaatccctgactaaatctaaaatcgccttaatattggtttgaggtaataaaaatgcatgaaataaccctacttcagggattatccctggcggcgttagtttttgttctggggattgatttttggctggaagccttatttttattccgcccgataatcgtttgtaccctaactggcgctattctcggtgatattcagactggcttaattaccggtggtctgacagagttggctttcgccggattaacccctgcaggtggtgttcagccgcccaacccgattatggcgggtctgatgaccaccgtcattgcatggtctacgggcgttgatgccaaaacagcaattggtcttggcctgccgtttagtttgttaatgcagtacgtcattctgttcttctattccgctttcagtttatttatgaccaaagccgataaatgcgcgaaagaggcggatacggcagcgttttcccggcttaactggacaacgatgctcatcgtcgctagtgcgtatgcggtgattgctttcctctgtacttacctggcacagggggcgatgcaggcgctggtgaaagcgatgcccgcctggctgacccacggctttgaagtggctggcggtattctgcctgccgttggttttggcttgctgctgcgcgtaatgttcaaagcgcaatatatcccttacctgatcgccggtttcctgtttgtttgctacatccaggtcagcaacctgttgccggttgccgtactgggcgcaggctttgcggtgtatgagtttttcaatgcgaaatcccggcagcaagcgcaaccgcagcccgttgccagtaaaaatgaagaagaggactacagcaatgggatctgaaatcagtaaaaaagatatcacccgtctgggctttcgtagcagcctgctgcaagcgagctttaactacgaaaggatgcaggcgggcggttttacctgggcgatgttgccgatcctgaaaaagatttataaggacgacaaaccgggcttaagcgcggcgatgaaagataacctcgaatttattaatacccacccgaatctggtcggattcctgatggggttattaattagcatggaagaaaaaggagaaaaccgcgacaccattaaaggcctcaaagtggcactgtttggcccaatcgccgggattggcgatgcgattttctggtttactttgttgccgattatggcgggaatttgcagtagttttgccagccagggaaacctgctggggccgattctatttttcgccgtttacctgcttatctttttcctgcgcgtcggctggacccacgtcggttatagtgtcggcgtgaaggcgatcgataaagtgcgagagaacagccagatgattgcccgtagcgcaaccatcctcgggatcacggtaatcggcgggctgatcgctagctatgtgcatattaacgtggtgacaagctttgccatcgacaatacccacagcgttgcgctgcagcaggatttcttcgataaagtcttcccgaacattttaccgatggcctacaccctgctgatgtattacttcctgcgggtgaaaaaagcgcatccggtgctgttaatcggcgtgacttttgtgctctctattgtttgttccgcattcggcattttgtaaatggaacgaggcactgcgtctggtggtgcctctttacttaaggaatttcatcctgtgcaaacccttcagcaagttgaaaactatacggcgttaagtgaacgtgccagcgaatatttattggccgtgatccgtagcaaaccgaatgccgtgatttgcctggcgaccggagccacgccattactgacgtatcattatctggtagaaaaaatccaccagcagcaggttgatgtcagccagctcaccttcgtgaagctcgacgaatgggtggatctgccattaacgatgccaggcacctgcgaaactttcctgcaacagcatatcgtgcagccgctggggctacgtgaagaccagctcatcagctttcgctccgaagagataaatgagacagagtgcgaacgggtaacgaacctgattgcgcgcaaaggcggtctggatttatgcgttctcggattggggaaaaacggtcatcttgggctgaacgaaccgggagaaagcctgcaaccggcctgccatatcagtcaacttgatgccagaacacagcaacatgagatgttaaaaaccgcgggtcgccccgtgactcgtgggatcaccttaggcctgaaggatattctcaatgcccgcgaagttttgttactggtgactggcgaaggaaagcaggatgcgacagatcgttttctcacggctaaagtctctaccgctatcccggctagttttttatggctgcacagtaactttatttgtttaattaacacctaaccagatgaaaaatttgctcaaaatgtttaaattaacttatgtaacagtcacgcattatattaaataacatttgactgggttgaacataacgccgatagcaaaaggagttatgttcaacaatttaattttagatatacatataacttgttctattaataaatcacctcgtattctgactcgccccctggcgcagcaaagtcaggcatttatactcttttgaatacatagaaaattgatatcaatataatgaaaatatcaaatatttgcatataaatataatcttaaagttcagtctatttaatgttcaatgaaatatttctgcctgtataatctttaaagatgttgaacatatattcacattaaatatgattatgtacttgttacaaggataaggttatatatgaataaagttacaaaaacagctattgcgggcttacttgcgcttttcgcaggtaatgccgctgcaaccgatggtgaaatagtttttgatggcgagattttaaaatccgcttgtgaaatcaatgactctgataagaaaattgaagttgctcttggtcactataatgccgaacagtttcgtaatattggcgagcgtagcccaaaaattccattcactattcctttagttaactgcccaatgactgggtgggagcacgataacggcaacgttgaagcgtctttccgtctatggctggaaacgcgagataatggcaccgtccctaacttccctaatctggcaaaagtaggctcttttgctggcatagcggcaacaggtgtgggtatccgtattgacgatgcggaaagcggaaacattatgccactgaatgctatgggcaatgataacacggtttatcagatcccggcggaatccaatggtattgtcaatgttgacctcatcgcttactacgtaagtaccgtagttccaagtgaaatcaccccaggggaagcagacgctatcgttaacgtaacgctggattaccgttaatacgttagggcgttatctgacctgtcagataacgcccttttccttcctctttctcgttgtatcaggttgaaaaataactatgagtaaacgaacattcgcggtgatattaaccttgttgtgtagcttctgtattggccaggcgcttgcaggaggaatcgttttacagcgaacgcgagtgatctatgatgccagccgcaaagaggctgcgttacctgtcgcaaacaaaggcgcagaaacgccttatttactgcaaagttgggtagataatatagatggtaaaagccgtgccccatttattataaccccaccgctatttcgtcttgaggctggcgatgacagtagtctgcgaattattaaaacagctgataacctgcctgaaaataaagagagcctgttctacattaatgttcgtgccattccagcaaagaaaaaaagtgatgatgttaatgctaacgagttgacgctggtatttaaaacacggatcaaaatgttttatcgccccgcacacctgaagggacgggtaaacgatgcgtggaaaagtctggaatttaaacgtagtgaccatagtctcaatatatataacccaactgaatattacgtcgtatttgccggactggcagtcgataaaaccgatctcacaagcaaaattgaatatatcgcgcccggagaacataaacagttaccacttcctgcatctggcggaaagaacgtgaaatgggctgcgatcaatgattatggcggcagttccgggacagaaactcgtccactgcaataaaaaatataaaaacacaggtcatcagggaatgccacaacgacaccaccagggacataaacgcacaccgaaacagttggcgctcatcatcaaacgttgtttgccgatggtgctcactggcagcggcatgctttgcactaccgctaacgccgaagagtattatttcgaccccattatgctggaaaccacaaaaagtggtatgcaaacaaccgatctgagccgttttagtaaaaaatatgcacaactaccaggaacttatcaggttgatatctggctgaataaaaagaaggttagtcagaaaaaaattacatttaccgccaatgcagagcaacttctgcagccacagtttacggtagaacaactacgtgagctgggtattaaggtggatgaaatcccggcgctggctgaaaaagatgacgatagcgtgatcaacagccttgaacaaatcattcccggtacagctgctgaatttgatttcaatcatcagcaacttaatttgagcattccccaaattgcactgtaccgtgatgcaagaggttacgtctccccttctcgttgggacgatggtataccaacgctgtttaccaactacagctttacaggttctgataaccgttaccgccagggcaatcgtagccaacgacagtacctgaatatgcaaaatggtgctaattttggcccctggcgattacgcaactattccacatggacacgcaacgatcagacaagtagctggaataccatcagtagttatttacaacgtgatatcaaggcgttgaagtctcagttgcttctgggagaaagcgccaccagcggcagtattttttccagctacacctttactggcgtgcaactcgcttccgacgataatatgttgccaaacagccagcgcggatttgccccaacggtacgcggtatcgcaaacagtagtgcaatcgtgactatcaggcaaaatggttatgtgatctatcaaagcaacgtgagtgcgggtgcctttgaaattaacgatctctacccctcttccaacagcggcgatttagaagtcacgattgaagaaagtgacggtacacaacgtcgctttatccagccttattctagtttacccatgatgcagcgacctgggcatctaaagtatagcgcgaccgctggacgctatcgcgctgatgcaaacagtgatagcaaggaacccgaatttgctgaagccacggcaatatatggtttgaataatacttttacgctgtatggcggcctgctcggttctgaagattattatgcgctggggatcggtatcggcggcacacttggcgcactgggcgcgttgagcatggatatcaacagagctgacacccaattcgataaccagcactcttttcatggctatcaatggcgtacgcagtacatcaaagatatcccggaaaccaacaccaatatcgctgtcagctactatcgctataccaacgatggctattttagttttaatgaagccaatacccgcaattgggactataacagtcgccaaaaaagtgaaattcaattcaacatcagccagacaatatttgatggggtaagtctgtatgcctccggtagccagcaagactattggggcaataacgataaaaacaggaatatctctgttggggtttccggccagcaatggggagttggttacagcctgaattatcaatacagccgctacactgatcaaaataatgaccgcgcactctctttgaatctcagtattccgttagaacgctggttaccgcgtagccgggtttcctatcagatgaccagccagaaagatcgcccaacccaacatgaaatgcgtcttgatggcagtctgctggatgatggtcgcctgagctatagcctggaacaaagtctggatgacgataacaaccataacagtagcctgaacgccagttaccgtagtccttatggcaccttcagtgccggatacagctacggtaatgacagcagccaatacaattacggcgttaccggcggcgtggttatccatcctcatggcgtgacgctcagccaatatctgggcaacgcttttgcgcttatcgatgctaacggagcatctggcgtgaggatacaaaactatccggggattgctaccgatccttttggctatgcagtggttccttatctcacaacttatcaggaaaaccgtctcagcgtagatactacgcagctgcccgataacgtcgatcttgaacaaacaacacagtttgtggtgcccaacagaggtgcaatggtagcggcgcgtttcaacgccaatatcggttatcgcgtacttgttacagtcagcgatcgcaacggtaaaccgttgccctttggcgctcttgccagcaacgatgatacggggcaacaaagtatcgtcgatgagggcggcatactatatctctctgggataagcagtaaaagtcaaagctggactgtacgctggggaaatcaggcagatcaacaatgtcagtttgctttcagtacaccggatagtgaacctacaacctctgtattacaaggcacagcgcagtgccattaaggataaaaaaatgaaaagagcgcctcttataacaggtcttttgttgatatccacatcctgcgcttatgcctccagtggagggtgtggagccgacagcactagcggtgcgacaaattacagcagtgtggttgatgatgttacggtgaaccagacagataacgtgacaggacgggagtttacctctgcaacgctaagtagcactaactggcaatacgcctgttcctgctctgcgggtaaggcagttaaacttgtctatatggtcagccccgtacttaccaccactggacatcagacaggatattacaaactcaatgacagcctggatattaaaaccacattacaggcaaacgacattccaggactcacaaccgaccaggttgtctctgttaacacccgattcacacagataaaaaacaacacggtatattctgctgcaacccaaacgggtgtttgccagggtgatacgtctcgttatggacccgttaatattggtgcgaacaccacctttaccctgtatgtcaccaagccatttctcggcagcatgaccattccgaaaacggatattgccgtcattaaaggcgcgtgggtcgatggaatgggaagcccgtctacaggtgacttccatgatttagtcaagttaagcattcagggaaatctcaccgccccacagagctgcaaaattaatcagggcgatgttattaaggttaattttggattcatcaatggtcagaagtttaccacccgcaatgccatgccagacggttttactccagtagactttgatatcacttatgactgtggtgatactagtaagattaaaaacagcttgcaaatgcgcatcgacggtacaactggggtagtagaccagtacaacctggtcgccaggcgaagaagtagtgacaatgtgcccgatgtcggtattcgtattgaaaatctcggcggcggagttgcaaatattccttttcagaacggtatccttcccgttaatccttccgggcatggcaccgtcaatatgcgcgcctggccagttaatctggtcggtggtgagctggaaacaggaaaatttcagggcacagccaccattaccgtcatcgtgcggtaaaagaagacgttgcgttttgattaacgcaacgcttcggcactgttacccctgctgctccagcgcatacttatacagcgcatttttcttcacgccgtgaatttctgcggccagcgccgccgcttttttcagcggcagttctgcctgtagcagcgccagcgtgcgcagggcatcggcgggtaagtcttcttcctgtgctttatgaccttcgacaatcagcaccatttcgcctttgcgacggttttcatcttcctttacccacgccagcagctcgccaacgggcgcgccgtgaatggtttcccaggttttggtcagctcacgcgccagaaccacgtagcgggattcgcctaataccgcaacgatatcttccaggctatctaacagacggtgggtagattcataaaaaatcagcgtgcgcggctccgcttcaatggcttttagcgcatcacggcggcctttacttttggcaggtaaaaagccttcgtaacagaaacggtcagagggtaaacccgctgcgcttaacgcagtgatagcagcacacggcccgggtagcggcaccacgcggatccccgcttcacggcaggtacgcaccagatggtagccaggatcgttaattagcggcgttccggcatcggaaaccagcgcaatgttttgcccctcttgcagcttcgccagcagcgtttcagctttttgttgttcgttatggtcgtgcagcgcaaacaaccgggcattaatcccaaaatgttgcagcaataaaccggtgtgacgagtatcctcggcggcaatcagatcaacggcctgtaatacctctaacgcacgctgggtgatatccgccagattgccgattggcgtcggtacaatgtaaagctggccctgagaattatccgcgctttggtgttgtttcattgtgtcgtccgtattgccgatttaatattgagcattgcgtaaaaaaaatatcactggatacattatggtacccagtacattttctcgtttgaaagccgcgcgttgtctgcctgttgttctggcagccctgattttcgccggttgtggcacccatactcccgatcagtccactgcttatatgcagggcacggcgcaggctgattctgccttttatcttcagcagatgcagcaaagctctgatgataccaggatcaactggcaattactcgccattcgtgcactggtgaaagaaggtaaaaccgggcaggcggttgagttgtttaaccaactaccgcaagaactgaacgatgctcagcgtcgcgagaaaacactgctggcggtagagattaaactggcgcagaaagattttgctggcgcgcaaaacttgctggcgaaaatcacacctgccgatttagaacaaaaccagcaagcgcgttactggcaggcaaaaatcgatgccagccaggggcgtccttccattgatttactgcgcgcgttaattgctcaggaaccgctgcttggcgcgaaagaaaaacagcagaatattgatgccacctggcaggcgctctcctccatgactcaggaacaggcgaatacgctggtgatcaacgccgacgaaaatattctgcaaggctggctggatctgcagcgcgtctggtttgataaccgtaacgatcccgacatgatgaaagccgggatcgccgactggcagaaacgttatccgaacaatccgggcgcgaaaatgctgccaacgcagttggttaacgtaaaagcgtttaaaccagccagcaccaacaaaatcgccctgctgttgccactgaatggccaggcagcggtatttggtcgcactattcagcaaggctttgaagcggcgaaaaatatcggcactcagccagtggcagctcaggtagctgccgcacctgccgcagacgtagctgaacaacctcagccgcaaaccgtggatggcgttgccagcccggcacaagccagcgttagcgatctgaccggtgaacagcctgcagcccagccggtgcctgtaagcgccccggcgacaagcaccgcagcggtaagcgcacccgcaaatccatccgcagagctgaaaatctacgataccagtagtcaaccacttagccagatcttaagccaggttcagcaggatggcgcgagtattgtggtcggtccgttgctgaaaaataacgttgaagagttgctgaagagcaacactccgctgaacgtactggcactgaaccagccggagaatatcgaaaatcgcgtcaatatttgttacttcgcgcttagtccggaagacgaagcgcgcgatgcagcgcgtcatattcgtgaccagggtaaacaagcgccgctggtgctgatcccacgcagtagtttgggcgatcgcgtagccaatgcgtttgcgcaagagtggcagaaactgggcggcggcaccgttctgcaacaaaaatttggttccaccagcgaattacgcgcgggtgttaacggcggttctggtattgctttaacgggtagcccgattactctcagagcgacaaccgactccggcatgacgaccaacaatccaacgctgcaaaccacgccaaccgatgaccagttcaccaataatggcggtcgtgtcgatgcggtgtacattgtggcaacgccgggtgaaatcgcttttatcaaaccgatgatcgccatgcgtaacggtagccagagcggtgcaacgctgtacgccagctcccgcagtgcgcaagggaccgctggcccggatttccgactggagatggaaggcttgcagtacagcgaaatcccgatgctggcaggcggtaatctaccgttaatgcagcaggcactcagcgcggtgaataacgattatagtctggctcgcatgtatgcgatgggcgtcgatgcctggagcctggcaaatcatttcagtcaaatgcgccaggttcagggttttgaaatcaacggtaataccggaagcctgacggctaacccggattgcgtgattaacaggaacttaagttggctacagtaccaacaaggtcaggtagtccccgtcagttaaattaagtgattaacaggaacttatcatggctacagtaccaacaaggagtggtagtccccgtcagttaaccaccaaacagaccggcgatgcgtgggaagcacaagcgcgtcgctggctggaaggcaaaggactgcggtttatcgccgctaacgtgaacgagcgtggcggcgagatcgatctgataatgcgtgaaggccggaccaccatttttgtcgaggtacgctatcgccgctctgcgctttatggcggcgcggcagccagtgtgacccgcagcaaacaacacaaattattacagactgcccgcttgtggctcgcgcgtcataatgggagttttgatactgtggattgccggttcgatgtggtagccttcaccgggaatgaggttgagtggattaaggatgcctttaatgaccacagttaattaaggtttaaggattagcgtgcaagaaagaattaaagcttgcttcactgaaagcattcaaactcaaattgcggcggcagaggcgcttccggatgccatctcccgtgcagccatgacgctggttcagtctctgctcaatggcaacaaaatcctctgttgtggtaatggaacttccgctgccaatgcacagcattttgctgccagcatgatcaaccgtttcgaaacggagcggcccagcttacctgccattgcactaaatactgataatgttgtcttaacggcgattgccaacgatcgcttacatgatgaagtgtatgcaaaacaggtgcgggcgctgggtcatgcgggagatgtattgttagccatttccacccgtggcaacagccgcgatattgttaaagcagttgaagccgccgttacgcgtgatatgaccattgtggcattgaccggctatgacggcggcgaacttgcaggtttgttagggccacaggatgtggagatccgcattcctagccatcgtagtgctcgcattcaggaaatgcatatgctgacggtaaattgcctgtgcgatctgatcgataacacgcttttccctcaccaggatgattaaggagaatacatgaaggcattaagcccaatcgcagtccttatttccgcgctgctgttgcaaggttgtgttgccgctgccgtagtgggtaccgctgctgtgggtaccaaagccgcaactgacccacgcagtgtcggcacccaggtggacgatggtaccctggaagtgcgcgtgaacagcgcattgagcaaagacgaacagattaagaaagaagcgcgcattaatgtaacggcctatcagggcaaagtgctgctggttgggcagagtccaaatgctgaacttagcgctcgcgccaaacagattgctatgggcgtagacggtgccaacgaagtgtataacgagattcgtcagggccagccgattggtctgggcgaagcatctaacgatacgtggatcaccaccaaagtgcgtagccagctcttaaccagcgacctggtgaaaagctccaacgtgaaagtgaccaccgaaaacggtgaagtgttcctgatggggctggtgactgaacgtgaagcgaaagcggcggcagatattgccagccgggtgagcggcgtgaagcgggtaactacggcgtttacgtttattaaataacagccccttgtaatgcctgatgcgacgcttgccgcgtcttatcaggcctacaacgatacaaaccgtaggtcagataaggcgtttacgccgcatccgacatgttttccctcaaatcagaacaacagcgccagcccgccgacaatcacaccagacactgccaccatcgcccctgtcagccataaggctttcgccgggaacgctttgcgcagcataatcagactcggcaaactcactgccgggagcgtcatcaacaatgccagcgccggagcggttcccatacctgccagcatcatcgtttgtacaatcggaatttctgctgccgtgggaatgacaaacaagcatcctgctaccgccatcgccaccacccacatcaggctgttatcgacagcaccatcggcatgggggaataaccagacgcgagcggcacccaacaccagtactgcaaggatgtaaaccgggatcgtactccagaaaagcgtccatagcgccctgccccagcggctaaaaaacccgccctgtgcttccggtatgtcaatttcgaccggtgcctgcgtttgcggtgtttcacgcacccatttttgcaccagcgtcgcaatcagcaacaccatcaccagcccggccaccagacgaatcgccgcaaaaccccagccgaggacaaagcccataaacaccagcgtcgccgggtttaacaccggattgcccatccagaatgccagcgcaccgcccatgctcacctgttggcgacgcattcccgccgcgaccggagccgcacagcaggtacacatcatgcccggcaagctaaacagcgttcccagcagcgtgccgcgaaagcggctttgcccaagcgtacgcaacaaccagtcacgcgggatcagcacctgaatcaagctaccgaggatcacccccagcaccgccgctttccataccgcgaggaaatagatcatcgcgtaatccaacgccgcctgccatgggttagcatccgcctgcgcaaggatagatttaccgatactgtgggtttcggcagcagtaaacgctttgccgtagtaaggttcccatttcacataccagagaccggcaatgacaacgagaaagaaaagcgcgggtttccaccactgaatgggcgttgccgcctgagaactagactgaccagtcatagcattccccaggaataagttatgataattgagcgcgtgaatattacgctcactatcaattcttgggaataattattcagctcttttgcgtaattcactagagcttaaaatcgtcacgccttcatgctcaggccgcatgctctctgccagcatgacccgcgccacgtctctcgcatcaatggatttccagttacctggtaacaaacggaacagcggcgcaaaaagcgtttcgttcatccgctgtttgctacgatcgcccagtaacatgctcgggcgagcaatggtcaatttcggccagttctgggcgattaatgcttcttccatctcccctttgacgcggttatagaaaaacgggctgtgggcattggcacccatcgcactgactaccaacatatgctgcgcgcccagtcgccgcccggttaatgcggtatccactaccagcgtgtaatcggcatgaataaacgcctctttgctccccgcttctcgccgcgtggtgccgagacaacaaaacacaatgtcgatgggatcggtgacctgcgccaacgcgtcactcagttgcggatcatggggattaaacaccccgggcatatcgcccaacggacgtcgcgtcggcgcagcaatggcgttaactttcggttcgttaatcaacatccgcagcaggtgaccgcccaccagccccgttgcgcctgtaatcagtacctgactcatcttcgctcctttacagaattgtctgccttgcgctccacggctcatgcaccaggcttaatagaccatgaggtaattatccccgattgtgggaaattcgcctcatccaatgcaacaacgcggaggaagcatgagtaagaaaattgccgttttaatcactgatgaatttgaggatagtgaatttactagtcccgcagacgagttccgtaaagccggacacgaagtgattaccattgaaaaacaagcgggtaaaacggtgaaaggcaaaaaaggagaagccagcgtgaccatcgataaatccatcgatgaagtgacgcctgcggagtttgatgccctgctgctaccgggcggccatagtccggattatctgcgtggggacaaccgttttgtcacctttacccgtgattttgtgaatagtggcaaaccggtgtttgccatctgtcacggcccgcagttgctgatcagcgccgatgtgattcgggggcgcaaactgaccgcagttaaaccgatcattattgatgttaaaaatgcgggcgcggaattttacgatcaggaagtcgtggttgataaagatcagctggttaccagccggacaccggacgatctgccagcgtttaaccgcgaggcgttacgcctgctcggtgcctgattacgcctgctcggtgccactgtcgcgtagccaaatcatttttttaccaaagcccagcgtgttgtcggtgaatttgatttcatcgagccggatttcccacaccggggcgctcagcattctggcaaccggaaagcgacgattgtacgccttgcgcgcgaggtcgctttcctcaccttccagcctgcggatctcacctttaaactgcacaccgcgaattaacgctaccgttttcggctgaccgtttaccgttccggcaaccgcagcctgcggcccactcatctgcgcgtggcgcgttttttcttccgtcaaaatgtagaaggcgactttctgcgcatcaaaaagataaaaggcattagcgcaccagagttccccttcctgctgcacacaccaagtgacaacatgttgttttgccagccaacggctgatggcgatgagtgtttccattgctgttctcttttatactgtgggcctgaccttaacatgcgacgcagacgatgacaccctggtttctttacttgatccgtaccgccgacaataagctttataccgggatcaccacggatgtcgaacgccgctatcagcagcaccaaagcggcaaaggggcgaaagcactgcgcgggaaaggagaactaacgctggtgttttccgcgccagtgggcgatcgtagcctggcgttacgggcggaatatcgcgttaagcaactgaccaaacggcaaaaagagcgtctggtagcggaaggcgcagggtttgcagagctgttaagcagtctgcaaaccccggagattaaaagcgattgaaatgctcgtgatactcaaccaggccggtaacgccattcagcgcgtcatccgctaaacgatgtacctggaaggcgctttcagtgcccggccagcggcaacgcagatcgtgatgcgccgccagttcaaagccgaaacgactgtacagcgccggatcgcccagcgtcaccactgcggcatagccgaactcattaaggctatcgagtccttcatagaccagttggcgtgccagcccctgtccacggtatttttcatcaaccgccaacggtgccatgccgacccattgcaggtcttcgccctgcacatcaaccggactaaatgccacatagccaatgacctgaccttcgtcatctgtcgccaccagccccagcgtcagaaagccatcttcacgcagatcgtgaaccagcttcgcttccgcatcactttcgaaactgcgacgcagcagggcatcaatacccggcgcatcaatgggaatttctactcgaattagcatggttcacctacgcttgtctgtttggtttcaggcgcggttttcattcccgcctcaacaaaatccgccagttgcagcagcatcatgcgtaaggctttcggcatttgctccagttcaatggcgtccatcaggtttttcacatacagccccagctccgtatcgccttcaatcaccagccgacgctggaagaagagcgtatccggatcttgtttacgcgccgcaatcatcagcagatcgctggcgtcggcactaaaactcacatcagcttgcgcgttctggctaacgaccagtttgccattcaccacgctggtaaaccattgcaggtcaatatcacgcacatgaatacttaaccagcggccttcaagaaactccagctcgccatcatccagcgcctggcggaattgccagcttaagacctgctcaagaacctggcgttttagcgcaaatggcgtcagttttaccggtacactcaacagagatggccccaaatgcacaatacgggaacgcagtttatccaacacgagttttactccctgtttcaacaatcatcctattttgccatatcagaaaaataacatagcggtataaatcaacaattccatatgaaattgctgctaccaccaatacaactttaactgccttaaatcaaaaattgtcgcagcaaggttaactaaaatcccagttcgttaacatttttgcgttttgatagcgcaaccttcaggaaaaattatggagctgctctgccctgccggaaatctcccggcgcttaaggcggccatcgaaaacggcgcagatgctgtttatatcgggctaaaagatgataccaatgcccgtcacttcgccggccttaactttaccgagaaaaaattgcaggaagcggtgagttttgtccatcaacatcgccgcaaacttcacatcgcgattaacacttttgcgcatccggacggttacgcccgttggcagcgcgccgtggatatggcggcgcagctgggtgccgacgcgctgatcctcgccgacctcgccatgctggagtacgccgccgagcgttatccgcatattgagcgccacgtaagcgtgcaggctagcgcgaccaatgaagaggcgattaacttttatcatcgccattttgacgttgctcgcgtggtgctgccgcgcgtgttgagcattcatcaggtgaaacaactggcacgggtcacacctgtaccactggaagtctttgctttcggcagcctgtgcattatgagcgaaggtcgttgctatctgagcagctatctgacgggtgagagccccaacaccataggcgcgtgttctccggcccgtttcgtgcgctggcaacaaacgccgcaggggctggaatcccgcctgaacgaagtgctgatcgaccgttatcaggacggcgaaaacgcaggttatccgacgctatgtaaagggcgttatctggtggacggcgagcgctatcacgcgctggaagaaccaaccagtctcaataccctggaactgctgccggagttaatggcggcgaatattgctagcgtgaaaattgaaggccgccagcgtagcccggcgtatgtcagccaggtggcgaaagtctggcgtcaggctatcgaccgttgtaaggccgatccgcaaaactttgtaccgcaaagcgcgtggatggagacgctcgggagcatgtccgaaggcacgcaaaccactcttggcgcatatcaccgtaaatggcagtgagaaaagcaatgaaatattccttagggccagtgctgtggtactggccaaaagagacgctggaagaattttatcagcaggccgccaccagcagcgccgacgtgatttatcttggtgaagcggtatgcagcaagcgtcgggcaaccaaagttggcgactggctggagatggcaaaaagcctcgccgggagtggtaagcagattgtgctctccacgctggcgctggtgcaggcaagttctgaactgggcgaactgaaacgctatgttgagaacggtgagtttctgattgaagccagcgatctcggcgtggtgaatatgtgcgctgaacgcaaactgccgttcgtcgccgggcacgcgctgaactgctacaacgcggtgacactgaaaatattgctcaaacagggcatgatgcgctggtgtatgccagtggagctttcccgcgactggctggtgaatctgcttaatcagtgcgatgagctgggcattcgtaaccagtttgaagtggaagtcctgagctacggtcatctgccgctggcctactccgcccgctgctttaccgcgcgtagcgaagaccgcccgaaagatgagtgtgaaacctgctgcattaagtatccgaacgggcgcaacgtgctgagccaggaaaaccaacaagtgtttgtactcaatggcattcagaccatgagcggctacgtttacaacctcggtaacgagctggcatccatgcagggcctggttgatgtggtccgcctgagtccgcagggtactgacactttcgcgatgctcgacgccttccgcgctaatgaaaatggcgctgcaccactgccgttgacggcgaacagcgactgtaacggctactggcggcggctggcaggactggagctgcaagcctaagtaaatagctcactttgttaacaactttaactactctttaatgcagtattaaagattaatcggtaacaaagtgagctgttatgactgataaaaccattgcgtttagcctactcgatctggcccccattcccgaaggttctagtgcgcgagaagcattctcccactctctcgatctcgcccgtctggctgaaaagcgcggctatcatcgctactggctggcagaacaccacaatatgactggcattgccagtgctgccacgagcgtattgatcggctatctggcggcgaataccaccacgctgcatctggggtctggcggcgtgatgttgcctaaccacagtccgttggtcattgcagaacagttcggcacgcttaatacactctatccggggcgaatcgatttggggctgggtcgtgctccgggtagtgaccaacggacaatgatggcgctacgtcgtcatatgagcggcgatattgataatttcctccgcgatgtggcggagctggtggactggtttgacgcccgcgatcccaatccgcatgtgcgcccggtaccaggctatggcgagaaaatccccgtgtggttgttaggctccagcctttacagcgcgcaactggcggcgcagcttggtctgccgtttgcgtttgccagtcacttcgcgccggatatgctgttccaggcgctgcatctttatcgcagcaacttcaaaccgagtgcacggctggaaaaaccatacgcgatggtgtgcatcaatattatcgccgccgacagcaaccgcgacgctgaatttctgtttaccagtatgcagcaagcctttgtgaagctgcgccgtggcgaaaccgggcaactgccgccgccgattcaaaatatggatcagttctggagtccgtctgagcagtatggcgtgcagcaggcgctgagtatgagcttggtaggtgataaagcgaaagtgcgtcatggcttgcagagcatcctgcgcgaaaccgacgccgatgagattatggtcaacgggcagattttcgaccaccaggcgcggctgcatagctttgagctggcgatggatgttaaggaagagttgttgggataatgtgtcttaacgcgggaagccttatccgagctggcaacgctgtcctacatagacctgataagcgaagcgcatcaggcattgtgtaggcagcagaaatgtcggataaggcaccgctgattactgatacaccggcagtaaattaaagctgcttaaaatatgcaccagtgcgttgccgacgccaaacaccagaatcagcgcaatcatcggcttgccaccccagacgcggaatttcgggctgccaaagcgtttacggcttgcacgggctaacagcgccggaacaattgccgcccagatggtagccgctaaaccagcataaccaatggcgtacaggaatccgttcgggaacaacagcccccccacaactggcggggcaaaggtcagcaatgccgttttcaagcggcccacagcgctgtcgtcgaaaccaaacagatctgccagatagtcaaacaaacccagcgttacgccgaggaagctactcgctaccgcaaagttactgaacacgaccagcagcagatccagactacggctgttcagtacgccgcttaacgcctgtaccagcacatcaatattaccgcccttctctgcaataccgataaactccggacgcgggatgttacccatcgtcgccagcaaccagatggtatacagcgccagcgccatcagcgtaccgtacaccagatatttcacgatggttttcggatctttgccgtaatacttcatcaggcttggcacgttaccgtgataaccaaagcttgccagacagaacggcagggtcatcaacagatacggtgcataagacgcattgctttcggcgacgttgaacaatgtcgcaggctgcacatgccccagcaggctaccaaaggtgaggaagaaggtaatgactttcgcccccagcacaatcgctgtcatgcgactgacggctttagtgctcaaccacaccacaaacgctaccagcaatgcaaaaccaaaacccgccgcccgtgccgggacgtttagactcatctctgcgaaggtgtgatgcagaatgctaccactggcagaaatataggcataggtcaggatatagagcacaaaggcaatggaaatgccgttgaccacgttccagcctttgcccagcaaatctttggtgatggtgtcaaaactgctaccgattctgtaattcaggttagcttccagaatcatcaagccggaatgcagcatacagaaccaggtaaagatcagcgccgccatactccagaaaaaccacgccccggacatgaccactggcagagaaaacatccctgcgccaataatggtgccgccgataatcaccacgccgccaagcaggctcggactcgtttgggtggtggttagtgttgccatgagggcttctctccagtgaaaaatagtgcgactgcgttgttatgcattgcactgtaccagtacacgagtacaaaagacagaaaaaaagccccgatggtaaaaatcggggctgtatatattattttacagattgtgttcgctgttcagcgatgattacgcatcaccaccgaaacgacgacgaccggtagaatcatcacgacgcggagcgcggccttcacgacgttcgccgctaaaacgacgaccatcaccacggccaccttcacggcgttcaccgctgaagttacgaccgccttcacgacgttcgccaccgaaaccacgaccaccgccacgacgctcaccgccagtatgcggctgtgcatcgcccagtaactgcatgttcatcggcttgttgagaatgcgagtgcgcgtaaagtgttgcagcacttcacccggcatacctttcggcagttcgatggtggagtgagaagcaaacagcttgatgttaccaatgtaacggctgctgatgtcgccttcgttagcaatcgcaccaacgatatgacgaacttcaacaccatcatcgcggcccacttcaatgcggtacagctgcatatcgccaacatcacgacgttcacgacgcggacgatcttcacggtcaccacgcgggccacggtcgttacgatcgcgcggaccacggtcatcacggtcacggaattcacgtttcggacgcatcggcgcatctggcggtacgatcagagtacgttcaccctgtgccattttcagcagtgccgcagccagagtttcgagatccagctcttcaccttcagcagtcggctgaattttgctcagcagtgcgcggtattgatccagatcgctgctttccagctgctgctgtactttagcggcgaatttttccagacggcgtttgcctagcagttctgcgttcggcagttctacttccggaatagtcagcttcatagtacgttcaatgttgcgcagcagacgacgctcgcggttctcaacgaacagcagcgcgcggccagcacgacccgcacgaccggtacgaccgatacggtgaacgtaagactcagaatccatcgggatatcgtagttaactaccaggctgatacgctcaacgtccaggccacgggctgcaacgtcggtcgcaatcaggatgtccagacgaccatctttcaggcgttccagtgtctgttcacgcagcgcctggttcatgtcaccgttcagcgcggcgctgttgtagccgttacgctcaagagcttcagccacttccagagtcgcgtttttggtacgaacgaagataatcgccgcatcaaaatcttccgcttccaggaaacgtaccagtgcttcgtttttgcgcataccccagacagtccagtagctctggctgatgtcaggacgggtagtcacgctggactgaatgcgcacttcctgcggctctttcataaagcggcgggtaatgcgacgaatcgcttccggcatggttgcagagaacagagcggtctgatgaccttccgggatctgcgccataatggtttcaacgtcttcgatgaagcccatgcgcagcatttcgtcagcttcatccagaaccagaccgctcagtttagagaggtccagagtgccacgtttcaggtggtccagcagacggcccggagtaccgacaacgatctgcggcccctgacgcagggcgcgtaattgcacgtcataacgctggccgccgtacagagcaaccacatttacgccgcgcatgtgtttagagaaatccgtcattgcttcagcaacctgtaccgccagttcgcgggtcggtgccagcaccagaatctgtggtgctttcagctcaggatcaagattctgcaacagaggtaaagagaatgctgcagtttttccgctccccgtctgggccatacccagaacgtcgcggccattcagcagatgtggaatacactctgcctgaattggagatggtttttcgtaacccagatcgttaagggcttcaaggataggagccttcaggcccagatctgcaaaagtggtttcgaattcagccatgtagtacgtgtgcctcaaaattaatggcggccagtctacataactcatcatgaaattgatcagcaattttcattgaaaagtgtgaaccggctcaaagtaggtgtattaacgaacaacaacgccctcacccgttaaggtgatggcaatcaaaaaagattacgggctgatgtgtacgtcagttattgctggtcgctttctgccaggtcatcttggtcctggcccaggaggcttaattccaacaatgcgtatcggtgctcaacaaagttatgaacgttgttggcaaccgccagtttgaacagtgccgtggcgctgtccaaatcccccagacttaggtagtacttacctaaatagaagttggtttcactgagatgctcagcgaggctggtgttatccgttgcgtccgccttgagcctttccattaacgtttgttcgctaatgttgcccaggtagaactcgacaatgttccatccccactgttccttatcgcttttttcgaagtgctgtttcaacacttctttagcctgcttctcatcgagcttctgctcggcgagataaagccacagactacggaaaggatcattgggatcgtcttgataaaacgccagcagatcatcttgcgctaacttgtcacgaccgccgtaatataatgcgatcccgcgattcaagtgcgcgtagttgtaagttggatcaagctcaagtacagaatcaaacgcttcataggcagcatcaaaattgcctgcctgcgttaaatatatgcctaagtaattgaatacttcaggcatatccggtcggattgccagcgcttggctaaaatcgttacgcgctaatgccctcagaccgagactatcatacaacactccgcgctcatataaaagctgtgcgcgttcgtcatcggttaaagcccgactggcaaggatttgttccatacgtgccagaatcacttcctgctgtaaagtcggttgcaatggtaccgcgaggacttcacttttacgccaggaagtattactgcatcctgcaagcgtaagtgctgtcgcaacgaaacaccagcgcaaaaaaggcttcatttcccactcccgaagaccacggttgaatgaacgtcctgttcccggttgctaacaaggcgtcctgcccggttaaaagccccccgccgcagcggagggcaaatggcaaccttactcgccctgttcagcagccggagcttccggtgctgcagcaggttgagactgctcagtcgcttctttaatgctcagacggatacggccctggcgatcaacttccagaactttcaccggtacttcctgacccatctgcaggtaatcggtcactttctcaacgcgtttgtcagcgatttgagagatgtggaccagaccttctttaccgccgccgatggcaacaaatgcgccaaagtcaacgatacgggtcactttaccagtgtagacgcggcccacttcgatttctgcagtgatctcttcgatacgacgaatagcatgtttcgctttctcgccgtcggtcgctgcaatcttcacagtaccgtcatcttcgatttcgatggtggtgccagtttcttcggtcagagcacggattacagaaccgcctttaccgataacatctttgatcttgtccgggttgatcttgatggtatggatacgcggtgcgaactcagagatatcgccacgcggcgcgttgatcgcctgttccattacgcccaggatatgcagacgcgcacctttagcctggttcagcgcaacctgcatgatctctttggtgataccttcaattttgatatccatctgcagtgcagagataccgtcgcgggaacctgcaactttgaagtccatatcgcccaggtgatcttcgtcgcccaaaatgtcagacagtacaacgtagttgtcgccttctttcaccagacccattgcgatacccgcaacggcagctttgatcggcacacctgcgtccatcagcgccagagacgcgccgcacacggaagccatagaagaggaaccgttggattcagtgatttcagacacaacacgtacggtgtacgggaatttgtccatatccggcatgactgccagcacgccgcgcttcgccagacgaccgtgaccaatttcacgacgcttcggagaaccgaccatgccggtttcgcctacggagtacggagggaagttgtagtggaacaggaaggtatcggtacgttcgcccatcagttcatcaagaacctgcgcgtcacgagcagtacccagcgttgcggtaaccagcgcctgcgtttcaccacgggtgaacagcgcagaaccgtgagtacgcggcagcacgccagtacgcacatccagaccacggatcatatctttttcacgaccgtcgatacgcggttcgcctgccagtacgcggctacgaacaacgtttttctcgatcgcgtgcagaatttcacccagttcgttttcgtccagggtttcgtcttcagcaagcagcgtcgcgatggtttcagatttgatgacatcaacctgcgcataacgctcttgtttgtcggtgatgcggtaagcatcgctcaggcgagcttcagccagtgcagcaacgcgcgcgtttagcgcttcgtttaccggctccggctgccagtcccaacgcggtttaccggcttctttcaccagttcattgatgttctgaataacaacctgctgttgttcatgaccgaacactactgcgcccagcatctggtcttcgctcagcagttgagcttcagattcaaccatcagtacagcggcttcagtaccggcaacaaccagatccagtttgctctctttcagctcgtcctgagtcgggttcagtacgtactggtcattgatgtaacctacgcgggcagcaccaatcgggccattgaacggaataccagacagagacagcgctgcggaagcaccaatcatcgcgacgatatccgggttaacttgcgggttaacagaaaccacggtggcgataacctgaacttcgttgacgaagccttccgggaacagcgggcgaatcgggcggtcaatcagacgcgcgatcagggtttcgccttcgcttgggcggccttcacgacggaagaagctacccgggatacgaccagcagcgtaggtacgctcctgatagttaacggtcagtgggaagaagtcctgacctggtttggcttttttctggccaacaacggtaacgaataccgcggtgtcatccatgctaaccataacagcggcagtagcctgacgagccatcatgccggtttccagagtcacggtgtgttggccgtactggaatttacgaacgatcggattaagcaatgtaatatcctttctctttcttagacagtaccttacggcactggtgttaataccgcttcttctgcgcatcctcgcgactaatgacaaccctaacccagctctatgtgggtaaagcctctcattagccgcgcgaacctctgcaacggaagatcattcatagcaacaatacattagtttccagtgaattgctgccgtcagcttgaaaaaaggggccactcaggcccccttttctgaaactcgcaagaattagcgacgcagacccaggcgctcgatgagctgggtgtaacgtgctacgtctttacgtttcaggtagtcgagcagtttacgacgctgagaaaccatgcgcagcagaccacgacggctgtggtgatcttttttgtgctctgcaaagtggccctgcaggtggttgatctgtgcagtcagcagtgctacctgaacttcggtagaaccggtgtcgtttgcgtcacgaccaaactcagaaacgattttagctgttgcttcagtacttagagacattttaaaactccaaagtatatagaatgaaaggacgccgatctctaattcagcgatcccagtgtacgttacgcaaagtgttaaacaatttacgcgacgttaagcggcagtattctactcgtagcgacctgttatcgcaagacggttaacattacgccgggtattcaaccaccaggcgacgaggcgcaacgcggccttcatcgtcaatttcgcccataccgataaatttgccgttctcaccttccgtgacgcgaaccagtccttccagtggcgcaccagatgtacgaaccgggttaccatttttgaagtaaacagaagacgttaacggaagattcaccaccggatagtcgctagctggactgtccattggcatcagtaatggatcaagtaactccgcggctggaatatcctgctgttcagcttgctcaacaagttcacgcaggtgctccagggtcaccatccgttcaaccggatatttacttaccgccagacggcgcaggtaaataacatgcgcgccacagccgagtttttcacccaggtcatcaatgatggtgcggatataagtgcctttactgcagtgaatttccagctccagctcattgccttcatggcgaataaacagcaattcataaacggtaatcggacgcgcttcacgcggaacttcaatgccctgacgcgcatattcgtacagttttttgccctgatatttcagtgcactatacatgctagggatctgttcgatatcgccacggaaagtatccagtgccgctgccagctgctctgcgctaaaggttaccggacgttcttcaacgatctgtccgtcggcatcagaagtatcggtacgctgtccaagacgcgcaatgacccgatagcgtttgtcggagtccagcagatactgggaaaacttcgtcgcttccccgaggcaaatcggcaacatgccggtcgccagcgggtccagcgcaccggtatgcccggcacggttggcgttatatatacgtttcactttttgcagcgcatcgttgctggacataccctgaggtttatccagcaacaaaacgccgttaatgtcgcgaccgcgacgacgaggacgactcattagtcctccttgctgtcgtccgggttaacacgacgttcttcgtcatgtttgaccacgctggtcaccaggttactcatgcgcatcccttcaaccagagagttgtcgtagaagaaggtcagttccggcacgatacgcaggcgcatcgctttccccagcaggctgcggatgaaaccagaagcttcttgcaacgctttgatgcccgctttaaccgcgtcttcatctttgtcgttgaggaacgtcacatatactttggcatacgccaggtcgcgagacatttcgacaccggaaacggtggtcatcatgcccaggcgaggatctttaatttcacgctgcaggatgagagcgatctctttttgcatttcctgcgctacgcgctgcgggcgaccaaattctttcgccataataaattctcctgacaaaaaaggggctgttagcccctttttaaaattaatttcaggtggaagggctgttcacgttgacctgataagacgcgccagcgtcacatcaggcaatccatgccggatgcagcgtaaacgccttatcccgcatggaaccctaaaaaccttaagcaatggtacgttggatctcgatgatttcgaatacttcgatcacatcgccagtgcggacgtcgttgtagttcttaacgccgataccacattccataccgttacggacttcgttaacgtcatctttgaagcggcgcagggactccagctcgccttcgtggataaccacgttgtcacgcagaacgcggatcgggttgtgacgtttaaccacaccttcggtaaccatacagcctgcgatggcaccaaatttcgggcttttgaacacgtcacgaacttccgccagaccgataatctgctgtttcagttccggagacagcataccgctcatcgccgctttcacttcgtcaatcaggttatagatgacggagtagtaacgcagatccaggctttccgcttcaatcactttacgtgcagaggcatcagcacgtacgttaaagccaaccaggatggcgttggacgccgcagccagggtggcgtcggtttcggtgataccacctacgccagaaccgatgatcttcactttaacttcgtcagtagacagtttcagcaaggagtcggagatcgcttcgacagaaccctgtacgtctgccttcaggacgatattcacttcgtgaacttcgccttcggtcatgttggcgaacatgttctcgagtttagatttctgctgacgcgccagtttaacttcgcggaatttaccctgacgatagagtgcaacttcacgcgctttcttctcgtcacgtacaacggtaacttcatcacccgcagccggtacgccggacaggccgaggatttccaccggaatggacggacccgcttccagcacttcctgacccagttcgttacgcatcgcacgaacacgaccgtattcgaagccacacagaacgatatcgcccttgtgcagagtaccttcacgtaccagaacggtagcaaccggaccacgacctttatcgaggaaggattcgataaccgcaccgctcgccatacctttacgtaccgctttcagctccagaacttccgcctgcagcaggatagcgtccagcagttcatcgataccggtacccgctttcgcagatacgtgtacgaactggctttcaccgccccactcttccggcaggatgccgtactgggagagttcgttcttaacgcgatccggatcagcttctggtttatcgatcttgttcactgcaaccaccaccggtacctgcgccgctttcgcgtgctggattgcttcgatggtctgcggcatcacaccgtcgtcggcagcaacaaccaggactacgatgtccgttgcctgcgcaccacgagcacgcatactagtaaacgcggcgtgccccggggtgtccaggaaggtgatcatgccgttttcagtttcaacgtggtatgcaccaatgtgctgggtaatgccgcccgcttcgccagaggccactttcgtactacgaatgtagtccagcagagaggttttaccgtggtcaacgtgacccatgatggtcacaaccggcgcgcgcggttcagccgcagcacccgtgtcacggtcgctcattaccgcctcttccagctcgttttcacgacgcaggataactttatggcccatctcttcagcaaccagctgtgcggtttcctgatcgataacctggttgatggttgccattgcgcccagtttcatcatcgctttgatgacctgagagcctttaaccgccatcttgttcgccagttcgccaacggtgatagtttcgccgatcacaacgtcacggttaacggcctgagcaggcttctggaagccttgctgcaggctagaacctttacgttttccgcctttaccgccacgtactgctgcgcgtgcttcttcacgatcagctttactttcagcgtgtttgttgcctttcttcggacgcgctgctttcgcgttacgaccacggccacggccgccttcgacttcacgatcgctttcgtcttctgcctggcgagcatgttgagaagtagtgacgtgataatcgctggaatcttcagtcggttccgcgttatcagtccatttgttttcttccgccatacgacgtgcttcttcagcaacgcgacgtgcttcttcttcgagtttacgacgcgcttcttcttcagctttacgcttgagctctgcagcttcctgctcacggcgggctttttcagcctgggcgtttttagtcatatcgtcttgttgattgctcactttgtctttttccgcagcttcacgtttcgcttgttcagcagcttcacgcttagcttgttctgcggcctcacgttcagctttttgttgcgcctcgcgtttagcgctttcttctgcctcacgacgggcttgctcttccgcttcacgctgcgcttgctcttccgctgcaaggcgttcagcctcttgcggatcgcgtttcacaaaggtgcgtttcttgcggacttcgatttgtacgcttttgctttttccaccggtaccaggaatgttaagggtgctgcgtgttttacgttgcagcgtcaatttgtccgggccactatttttctgattcaggtggtcaatcaaagtctgtttctcttgtgcagacacagagtcgtcagcagacttccggatacctgcatcagcaaattgctgtaccaggcgttccacggaggtctgtcgctctgcggccagcgttttaatcgttacatctgtcatgctgttccttcctgctacagtttattacgcttcgtcaccgaaccagcaaatattacgggcagccataatcagtgctccggctttttcgtcggtcaacccttcgatatcagccagatcatcaatgccctgttcggcgagatcttccagcgtacaaacgccacgggcggccagtttgaatgccaaatcacgatctaccccttcaaggttcagcagatcgtcagccggtttgttatcaccgaggctttcttcctgggcctgtgcaatggtggccagtgcatttttagcacgctcgcgcagtgcttcaacggtcggctcatcaaggccttcgatttccaacagctctttcatcggcacataggccaattcttccagcgtgctgaagccttcttctaccagaacagtcgcgaagtcttcgtcgatgtcgagatatttggtgaaggtgtcgatcgctgcgtgcgcttccgcctgatgcttagcctgcaggtcgtcaacggtcatcacgttgagttcccaaccgctcagctggctagccagacgcacgttctgaccgttacggccaatcgcctgcgccaggttaccggcttcaacggcgatatccatggtgtgtttatcttcatccaccacgatagaagcaacgtctgccggtgccattgcgttaatcacgaactgcgccgggttatcatcccacaggacgatatcgatacgctcgccacccagttcagtagacaccgcctgaacacgcgcgccacgcatacctacgcaagcacctaccggatcgatacgtttatcgttggttttcaccgcgattttcgcacgagaacccggatcgcgagccgctgctttaatttcaatcacttcttcgccgatttctggcacttcaatacggaacagttcgatcagcatttccggcttggaacgagtgacgaacagttgcgcgccacgcgcttccgggcgaacggaatagagcacgccacgaacgcggtcgccagggcggaagttttcacgcggcagcatatcttcgcgcaggatcacggcttcagcgttgttgcccagatccagagagatgttgtcgcggtttacttttttcaccacgccggtgatgatttcaccttcgtgttcacggaactgatcaaccaccatcgcacgttcggcttcacgcactttctgcacgataacctgttttgccgtctgggtagtgatacggtcaaaggtaacagactcaatctgatcttcaacgtaatcgcccaggttcaggctttcatcttcataacgtgcggcttcaagggtgatttccttggtcggctgggtgacttcatcaacaactaaccagcgacggaaagtgtcaaaatcaccgcttttgcgatcgatctgtacgcggacgtcgatctcttgttcatattttttctttgttgctgtcgccagcgcgctttccaatgcttcgaaaatcttctcgcgaggtagcgccttttcattggatacggcttcaactacagccaaaatttctttgttcatcgcgggcttttcacctcatccagactattaaaagtggggaaccaggttcgccttctggatattactcagcgcgaacacttcatctttaccttcgacggtaactgtgatcatttcaccgtctaccgctttgataacgccctgccatttacgacggttttgtaccgccatacggagaaccagagtcacctcttctccgacaaaacgggcgtagtgttcagccgtgaacagtgggcgatcgagacccggactggagacttccaggttataagcaacggtgatgggatcttcaacatccagcacagcacttacctggtggctcacatcagcacaatcatcaacattgatgccatcttcactatcaatatagatgcgcagtgtggatgtgcgaccgcgaataaattcgatgccaaccagttcaaaacccagggcctcaactggcgcagtaatcatctctgttaatttttgctctaatgtggacaagcccacccccaagacataaaaaaagggcctaaagcccagttattctgtagtcagataacaaaaaaccccgataaatcggggctttatataactgaaccctataaccgcaactgcggtctggagcactttccagaaggattttttcaaatcccactacgaaggccgaagtcttcacagtatatttgaaaaaggactctaagggaaagtggttgcgggggccggatttgaaccgacgatcttcgggttatgagcccgacgagctaccaggctgctccaccccgcgcctgaaacgtggcaaattctactcgttttgggtaaaaaatgcaaatactgctgggatttggtgtaccgagacgggacgtaaaatctgcaggcattatagtgatccacgccacattttgtcaacgtttattgctaatcatgtgaatgaatatccagttcactttcatttgttgaatacttttgccttctcctgctctcccttaagcgcattattttacaaaaaacacactaaactcttcctgtctccgataaaagatgattaaatgaaaactcatttattttgcataaaaattcagtgagagcggaaatccaggctcatcatcagttaattaagcagggtgttattttatgacgacgattctcaagcatctcccggtaggtcaacgtattggtatcgctttttctggcggtctggacaccagtgccgcactgctgtggatgcgacaaaagggagcggttccttatgcatatactgcaaacctgggccagccagacgaagaggattatgatgcgatccctcgtcgtgccatggaatacggcgcggagaacgcacgtctgatcgactgccgcaaacaactggtggccgaaggtattgccgctattcagtgtggcgcatttcataacaccaccggcggcctgacctatttcaacacgacgccgctgggccgcgccgtgactggtaccatgctggttgctgcgatgaaagaagatggcgtgaatatctggggtgacggtagcacctacaaaggaaacgatatcgaacgtttctatcgttatggtctgctgaccaatgctgaactgcagatttacaaaccgtggcttgatactgactttattgatgaactgggcggccgtcatgagatgtctgaatttatgattgcctgcggtttcgactacaaaatgtctgtcgaaaaagcctactccacagactccaacatgcttggtgcaacgcatgaagcgaaggatctggaatacctcaactccagcgtcaaaatcgtcaacccgattatgggcgtgaaattctgggatgagagcgtgaagatcccggcagaagaagtcacagtacgctttgaacaaggtcatccggtggcgctgaacggtaaaacctttagcgacgacgtagaaatgatgctggaagctaaccgcatcggcggtcgtcacggcctgggcatgagcgaccagattgaaaaccgtatcatcgaagcgaaaagccgtggtatttacgaagctccggggatggcactgctgcacattgcgtatgaacgcctgttgaccggtattcacaacgaagacaccattgagcagtatcacgcgcatggtcgtcagttgggccgtctgctgtaccaggggcgttggtttgactcccaggcgctgatgctgcgtgactctctgcaacgctgggttgccagccagatcactggtgaagttaccctggagctgcgccgtgggaacgattatagtatcctgaataccgtcagtgagaacctgacctacaagccagagcgtctgacgatggaaaaaggcgacagcgtgttcagcccagatgatcgtattggtcaattgaccatgcgtaacctggatatcactgatacccgcgagaaacttttcggttatgccaaaactggcctgctttcctcctctgccgctagtggcgtgccgcaggtggagaatctggaaaacaaaggccagtaattcgacatcaaccctgcccttcaggggtggggttaccttgcttatcctctgtaaactcctttctgagcatcacataatcgaaaacatcatggtttgcatccacaacccgactgtctcctttatagtgtgcaatcacttcctcaagcgtttgcggctgttccggctttgttacccccatccacgcattaataaggtaattattgtaagctgtgctaaagatgttgttttccgttgtgcgatccacgccatccccaagaacggggctataccagataaacatcgggacatgatatgcctgctggctagcctccctgcctccatgaaaatagacgttcttcttcgtagggtcacgttccaggccgtggtcggcaaaatacatgacgctggcgcggcgatcttttaataattcaaaaacctgacctagcaaactatctgtgtaatgaatggagttgtcatagcaggcatcctgatcgtcctgcggttgaaacacggcgctggattgcggataggcgctacaagccggttcatggcttccatttaaatgaagaacaatcagtttcttttgctgcgtattttgctgtaatgcttggcttaaatgcggcaacaacaattcatcaaatcctctgacataaactgtttccatggcgcgcatggcgatactggtaactgctgtaccattctgccgaaaagcggattggctgcttagccagaaagtctgaaatcctgcttgattagccatattaataatgttgtcggggtaattatgaatgtcatgactcaaaacagaatcagcagttaaagaaaggggaacgctcagcgcagtgtaaggtgcgccgcttattgcttgattaaacagtttgatctgttttctttgtgcttcaacttgcggtgtcgtagagcgtgtatatccatacaaagacatattgtcgacacgtacagactcccccacaatcaacacgtaggtatcaatacctgtatccctgacacttaattgaaaatacggcaccgtgtttgcaatactgagtaatctttgatgctctttcgctgctaaagcaaaatagttgagattgaaaaacggcgtataggtagcaaatcggctcgctagtatatatggactgaacgcttttttattttttgcatctttataagcaaattgacaagcggaaaataaactgccgctaatgacaatcagcaataatattcctgtcactttttttgtcggcaaggaaacatcatattttattattactgccaaaaaaagaagggataaaaaagcaaaggcacatagataagggatatacatccccagcattttgacaacttcatccggatcactctggagcacactaatcgcaaatccatcattgaaagttgtaccaaaggtacaccaactatagaggctaatactcatgtctgccgcagtcagtaacacaaatggtgcggcaacaagcaggcgaagcggaagggaacttatacgttttacaaccaggatggtcagaacgaagaacagcaagcgctgaaccatatgcgctccggaagaagcgactaagttcgtaataccaaaaacaataacacaaagatacaacaaccaatgagatttaaaagttctagcaaatttgttgaatactgtcatccagaaatccaagttcacaaccaatataaacaattatcaacaatgtttaattttatatcagacatgtttttcaactctgatccatatcagaacgaaacactgttagttttttctttttaaatgatgcggccattgcgttctcagtaattaaataacattatcaatgcgtctctaaacattacgcagaacgtagccatcagtcgttatactgacaggagcaggatggtttatcgagaagtaaacatatccgtattcgtaccggaactggagttgacacaataaagtgccaattatgtcagtagaagggaaaaatttataactaaggcgtaccggcaccatcgtttcaaggtaccagctacgagtaaagcaactggacgagatacagatacctgacaaccattcctcagaccaggaccaaaacgaaaaaagacgcttttcagcgtctcttttctggaatttggtaccgaggacgggacttgaacccgtaagccctattgggcactaccacctcaaggtagcgtgtctaccaattccaccacctcggcacggatactactttttagttcgggatatcgctggtcggcttagccggagcagctggctgagtttgttcggttttcgccggtgcactcagattttcccattcgctacctttattggttttgttgctattgatgttacccagcaccagactgatgatgaagaataacgttgccagcagcgccgtcatgcgggtcatgaagttaccagaaccactactaccaaacagcgtagcggaagcgcctgctccgaaggaggctcccatatcagcgcctttaccttgctgcagcatgatcagaccaacaaggccaattgccacaataaggaaaactactaaaagagcttcatacataatcaacctgttccttgcggagttgccgcgtaccaatgcttcaaccaataaagcgggagtttttaatcttccccactgaagcgggtgtgaatactaaccaaagcgaatgaccttcgcaagggcaattttatcgcattgtatcaactgcggaaaaaaacagcaaaaccgatgtgttcgctgagaaaaaaggcgacaatcgccgcctttttagccagttatctaacgctttaaacggcttttactgcatcggcgatgcggtgtgcaaattcagtcacctgcgcttcgtcttcgccttccaccatcacgcgaattaacggttcggtgccggatttacgcagcaacacgcgtccacggttgcccagcgcagcttcaacctctgcggtcacggctttaacactctcatgctcaagtggatcgccgctacctgcggtgtaacgtacgttaaccagaatctgcgggaacattttcatgccgctgcaaaggtcgtgcaggctcatatggttacgtgccatcgccgccagcacctgcaagccagcaacgatgccgtcaccggtagtagttttatccagcaggatcacatgaccggaattctctgcaccgatacgccagcctttctcctgcattttttccagtacgtagcggtcacccactttcgcgcgcgcaaatggaattcctaactgtttcagcgccagttcaagccccatgttgctcatcaatgtacccacagcgccaccacgcagctggccctgacgaagaccttcacgcgcgatgatatacatgatctgatcgccatcgactttattgccttcatggtcaaccataatcacgcgatcgccatcgccgtcgaaggcaataccgagatccgctttttcagccagcacacgagcctggagcgcgcgaacgtcggtagcccccacttcggcattgatgtttacaccgtttggctcacaaccgatagcgataacgttcgcccccagttcgcgcagcacgttcggcgcgatgtgataagtcgcaccgtttgcacaatccaccacaatcttcagttcactgaggctaagttcgttcgggaacgtggctttgcaaaactcgatatagcgacccgcggcatcaacgatacggctggctttacccagttctgcgctatcaacgcagctgatctccttttccatttccgcttcgatggcctcttctaccgcatccggcagtttggtgccgtcgatagagaagaatttaatgccattatcgtagaacgggttatggcttgcagatatcacaattccggcctctgcgcggaaggtacgcgtcagataagccacggccggtgttggcatcgggccagtgaagagtgcggaaaggcccgctgccgccagacccgcttccagtgcactctccagcatatagccagaaatacgcgtgtctttaccaataataatcttacgggagccgtggcgcgccagcactttacccgcggcccaacccagcttaagcacaaaatcaggtgtgatcggcgcatcccctacacgaccacgaatcccatcggtaccgaaatatttacgattactcatagcgtttgttttcctttgcagacagagtggcttccaccacccgcatcgcttctacggtttctttgacgtcatgaacacgaatgatgtgcgcgccttgcattgcggcaatgaccgcacaggccagactaccgctcaggcgctcggacggccccacgttcagcagctgcccaatcatgctttttcgactcatacccaccaacagcggcaggttgaaatggtgaaattcagccaggcgcgccagtaaactatagttatgggagagatttttaccgaaaccgaatccggggtcgagcaacaatttctcttttgcgatacccgcctgctcgcaacgtgctatttgctcaataaagtagcgattcacttctgcaaagacatcgtcatacttcggagcttcctgcatggtttttggatttccctgcatatgcatcagacaaaccggtaaaccggtttctgcagccgcctccagagcgccaggttcggaaagggagcggatatcattaataatgtgagcgccaactttcgcactctcacggatgacttctggtttggatgtatcgacactgatccagacttcgaagcgttgagcaattgcctcaaccacaggaataacacgttgcaactcttcttcaacgctaacttccgccgcccctgggcgcgtggactcgccaccaacgtcaatgatcgtcgcgccagcgttgatcatcagattcgcatgtttcaccgcatctatcaggctgttatgcgtgccaccatcgctaaaggaatcaggcgtgacgttgaggatccccattacgtgaggatggctaaggtccagactagtaccctgggcaaagagtttcatgatgttatccctggtatgaattgataagaaaaaaccccggagcacgccccggggttttcggtacaaatacagtcatctgatgcgggaacttacttgtcgcctaactgctcactcatggtgttacccgggttcggcgtacgcggttcatcaaccggacgaggagcctttggactaccattgtcgccagaattgttagaagcgcctggttcttcccagcccgctggcggacgtacatcgcgacgtgccatcaggtcatcaatctgcggtgcgtcgatagtctcatatttcatgagagcatctttcatcgcatgcagaatatccatattgtcggtcagaagctgacgcgcacgattatagttacgctcaatcagtgctttcacttcctggtcgatgatacgtgcagtttcatcggacatatgtttcgctttcgctacgctacggccgaggaacacttcaccttcttcttccgcgtacagcagtggacccaatttctcagagaagccccactgagtcaccatgttacgtgccaggttggtcgcaactttaatatcgttggacgcaccggtagatacatgttccggcccgtagatgatctcttctgccagacgaccaccgtacagcgtagaaatctggctttccagtttctgacggctggcgctgattgcgtcgccctcaggcaagaagaaagtcacacccagcgcacgaccgcgtgggataatcgtcactttgtgcaccggatcgtgttccggcaccaggcgaccgataatcgcatgacccgcttcgtggtaagccgtgctttctttctgcgcttccgtcatcaccatggagcgacgttccgcacccatcatgattttgtctttcgctttctcgaactcaaccatgctcacaacgcgtttgttgccacgagcagcgaacagtgccgcttcgttcaccaggttcgccaggtcagcaccggagaaaccaggagtaccacgggcaatgattgccgcgtcgatatcgggtgccaatggtacgcgacgcatgtgaactttcaggatctgctcacgaccgcgaacatctggcaagccgaccacaacctgacggtcgaaacggccaggacgcagcagggccgggtcgagaacgtccggacggttagtcgcggcgataacgatgataccttcgttaccttcgaagccatccatctcaaccagcatctggttcagagtctgttcacgttcatcgtgaccaccgcccagaccagcgccacgctggcggcctacggcgtcgatttcatcgataaagatgatgcacggtgccgctttcttcgcctgttcgaacatgtcacgaacacgggatgcacccacaccgacgaacatttctacgaagtcagaaccggagatagtaaagaacggaactttcgcttcgcctgcaatcgctttcgccagcagcgttttaccggtacccggaggaccgaccatcaagacgcctttcgggatcttaccgccgagtttctggaagcggctcggctcgcgcagatactcaaccagttcagcaacttcttcttttgcttcgtcgcagcccgcaacgtcagcaaaggtcgttttgatctgatcttccgtcagcatgcgcgctttgctcttaccaaagctcatggcacctttgccaccgccgccctgcatttgacgcatgaagaagatccagacaccaatcagcaacagcatcgggaaccaggagatgaagatagaagccagcaggcttggttcttcaggcggttcaccgacaaccttgacgttcttggtcaacaggttatccagtaatttcggatcctgaaccggaatgtaagtggtataacggttactatctttcttggtaacgttgatttcacgtccgttgatacgcgcttcacgaacctggtcgttattgacctcttgtaggaaggtagagtaatccaccttacggccattagactcgctgggcccaaagctctggaatacactcatcagcacaacggcaatgaccagccagagtattaggtttttcgccatgtcactcaagggattaacctcttattacaactgtgttaaaaacagcgtcaggatactctatatccagcatctttcaaactttcgtctgaaatctcccggttagggtttacgcccggtcgctacaatatacacttcccggctacgtgcacgagaagagtccagcttacgaactttgaccttcgtaaacagggagcgaatttcccttagatactcatcgaaaccttcgccctggaacaccttcactacaaaactgccacctggcgctaatacatcacgacacatttctagcgccagttccaccagatacatggcacgggggatatccaccgccggtgttccgctcatgtttggtgccatatcggacatgacaacctggactttgctgtcgccaacgcgctccagcagtgctttcatcaccagttcatcacgaaaatcgccctgaagaaagtccacaccaacgataggatccataggtaaaagatcgcaagcgatgatgcggcctttgccgccaatttgggtgaccacatattgactccaaccacccggagcagcaccaaggtcgacaaccgtcattcccggtttaaagagtttgtcactttgctgtatttcatcaagtttaaaccaggcacgggaacgtaacccctttttctgtgcctgttgaacatatttatcgctaaagtgttcctgaagccagcggctggagctggcagaacgcttcttacctgtcatttaactttcccatggggataactcatcgtaaccaattgcgtaaatttttacgcgcctatttggtgatatatgggagatggcggtagaatgacccgttttcaatcccaacgtaagcaaaaaatacgatgaatctgagtactaaacaaaaacagcacctgaaaggtctggcacatccgctcaagccagttgttctgcttggcagtaatggtttgaccgaaggggtgctggccgagattgaacaagcgttagagcaccatgaactcatcaaggtgaaaatcgccaccgaagatcgcgaaactaaaaccttgatcgtggaagctatcgtgcgcgaaaccggcgcctgtaatgtacaggtcatcggtaaaacgctggtgctttatcgcccaactaaagaacgtaaaatcagcctgccacgctaagattatcctaaagttacacacatttgctgtgtaaaacgaggggttttccgcaggcaggagagcaaaatgccacgctctgttcgttgataaaaggccgcatagcggcctttttcctttctttacaatacatcaacatcttgagtattgggtaattcttacaggtattccaccttaattacttcaaattctacttcgccgcccggcgttttgatgaccacaacatcatcttcttctttgccgatcaggccacgagcaatagggctgtttacagaaatcaggttttgtttaaagtcagcttcgtcatcgccaacgatgcgataagtctgttcttcgtcagaatccagattcagcaccgttacggtagcaccaaaaataacgcgcccattgttgggcattttggtgacatcaatcacctgcgcgttgctcagcttggcttcgatgtctttaatacggccttcgcagaaaccctgctgttcacgagctgcgtggtattcggcgttttctttcaggtcgccatgctcacgcgcttccgcgatagcagcaatgatttcaggacggcgcacagatttcagaaaatccagctcttcgcgtaatttttcagcgccgcgtaaggtcatcggaatagcttgcatttgttatacctcttgaatattcctgatagggcaagtcttcacccaccccggctgttcggcctgcccggcataactccttaccgggaccagaagcaaaaaaataccgacccgggtacaagtcccaggtcagctacaattcacattttgatagtcattttaccctgaagttcccgaagggtcatcgtttactttatagggcgttgcgccgtagtatgacggctcgattccaggttgttagcgcgagattatgcgattttccagatttatcatcggattgaccagctgtatagcgttcagtgttcaggccgcaaatgttgatgagtacattactcaactccccgctggtgccaaccttgccctgatggtgcaaaaagtcggcgcgagcgcccccgctattgattaccacagtcagcagatggcgctgcctgccagtacccagaaagtgattactgcgctggcggcgttgattcaactcggccccgattttcgttttaccacgacgcttgaaaccaaaggcaatgtggaaaacggcgtacttaagggtgacttagtggcgcgatttggtgccgatccgacgttaaaacgtcaggatattcgcaatatggtcgcgactttgaaaaaatctggcgtcaaccaaatcgatggcaatgtgttgatagatacctccattttcgccagccacgataaagcccccggctggccatggaatgacatgacacaatgctttagcgctccgcctgccgccgccatagttgaccgcaactgtttctccgtcagcctctacagtgccccaaagcctggtgatatggcttttatacgcgtggcatcttattaccccgttacgatgttcagccaggtacgcaccctcccccgtggttctgccgaagcgcaatactgcgaactggatgtggtgccaggcgacctgaaccgctttacgctgacgggatgcctgccacaacgttctgagccgctcccgttggcttttgccgtgcaggatggagccagctatgccggtgcaattctgaaagatgagttaaaacaggcgggtatcacctggagcggaacactgctgcgccagactcaggttaacgaacctggaacggtagttgccagtaaacagagcgccccgctgcacgatctgcttaagattatgctgaaaaagagcgacaacatgatcgccgatacggttttccgcatgataggccatgcgcgcttcaatgtgcctggaacatggcgggccgggagcgacgccgtgcgtcagatcctgcgccagcaagccggtgtcgatattggaaacaccattattgccgatggtagtgggcttagccggcataacctgattgcccccgccaccatgatgcaggtgctgcaatacattgcccaacacgacaatgaacttaactttatctccatgctgccgctggcgggctatgacggctctttgcagtaccgtgcaggtctgcatcaggcgggcgtggatggaaaagtcagtgcgaaaaccggtagcttgcagggggtatataacctggcgggattcattaccacagcgagcgggcaacgaatggcgtttgtgcaatatctttctggctatgcagtagaacctgcggatcagcgtaatcgccgtattccgttagtgcgttttgaaagccgtttgtataaagatatttatcagaacaattaatcaaaaagaaaccccggcacatggccggggcttcagattattgacaaagtgcgctttgtttatgccggatgcggcgtaaacgccttatccggcctacaaaatcgtgcaaattcaacatattgcaattctcttgtaggcctgataagcgtagcgcatcaggctgatttggcgtttatcatcagtgattaacgcttgtaaatgaactcaacgccttcttcgtcgtcttcgtcccagtcgtcatcccagtcttcatcatcctcttcagcaatctcttcaagctgctggcgatgataatcatcccacatgaattcgactttctctggctgtttcgcttcttcagcctgcacgaccgggttttcaatgataaaggtcatcacatcccagcagagatctttcacgcccagtccactcgccgcagagatcagataatatttatcttcccagcccagcgcctcagcgatcgctttcgctttctcttcggcttctaccttatccagcagatcgatcttgttgaacactaaccaacgcggtttcgtcgccagatcctggctgtatttttccagctcgctgataataatacgcgcgttttcaaccggatcggtgccgtcaatcggatcgatatcgatgaggtgcaacaggacgcggcaacgttccaggtgcttcaggaagcgaatgcccagacctgcgccttccgcagcgccttcaatcagtcctggaatatcggcaacaacgaagctcttttcgttgtccattcgtaccacacccagacttggcaccagagtggtaaacggataatccgccactttcggtttagccgcgcttaccgcacgaataaaggtgcttttacccgcgtttggcatccccaacataccgacgtcagccagcagcatcagctccagcagcagctcgcgcttatcgcccggcgtgccgttggttttctgccgcggtgtacggttaacggagcttttgaaacgggtattgcccagaccgtgccagccgcccttagcaaccagcagacgctgaccgtgtttggtcatatcgcccatggtttcaccagtaccctggtcgattacacgcgtacctaccggcactttaatcgtcacgtctttaccgcgcttaccggtacagtcgcggcttgcgccattctgaccgcgctctgcacggaaagatttttcaaaacgataatcgataagcgtgttcaggttctcgtcggcttccatccatacgtcaccaccatcaccgccgtcgccgccatccgggccgcctttcggaatatacttttcgcggcggaagctcacgcaaccattaccgccatcacctgcaacgaccagaatgcttgcttcatcaacaaacttcattttattctccgtaaatcattcgcctgcgcggggttggcttaccaccgttgtatgcttacgtaatccgccccaaatacgatgaccaatggcggaatacatcgcgcccgcaaccacgacaaacgcaccgagataacctaaaaggtttaacatcggtctggcgaagaaatcgggccaggccagacttaaaagatcactaaaaaacagcgtaaacagtggggtgagcgtgatgatcgcgctcacctgcgctgcctgccagcgagccatcgcttccgccagggcgccatatcctaccaaggtattcagtccgcaaaaaattaaacatgcgagctgccagtggctaagctgcgctatcactccaggctttgccagagggaagagcgcaattgtacataaagtgtacagtaaaaacaggatctgcggactggccagccgacgcaataaaaccttttgcgccacgccataactcacccaaaccgtcgccgcaccgaccccaaagataactccccaggtgtaatcggtgagctttgtaaatatctcgaccagactggtgttaaaaaacatcaccaggccgctcaggagcatcaatgcccctacaacctgagtgctgcgcattttctctttgaggataaatacgctggcaaccatcatgccaactgggctgagttgcccaatcacctggctagcggtcggactcaggtattgcaaggaactgctgaacaggatgaagttcccaaacagcccggcggtcgccactgccaacaaaatcaaccagcgtggcttacgaaacacgcgtaatggcggcaacctcttcttcaccgcaagaatggcacccaggccaatactcgccatcaagaaacggtaaaacacgattgtcggaggttccatcacctccagcacctgcttcattgcgattggcaacgccccccagcaaattgctgtggtgagcgccaaaagaatgccaatgcctgcctgctgcttcataccgtattccctgcaaagcgcatttgcggattaacgtcgcaccatgcgcatttttaccggttatcgaatgtaaaaagccccgcaacgtgttgcggggctttcatccgttaccgggacgcgaaaaacttattcagcttcgatgctgataaatttacggtttttcgggcctttaacttcgaatttcactttaccgtctgctttagcaaacagagtgtggtcacgaccgcaacctacgttagcgccagcgtggaatttggtaccacgttgacgaacgatgatgctacccgccagaacggattcgccaccgaaacgcttaacgcccaggcgtttagcttcactatcgcgaccgttacgtgtggagccgccagcctttttatgtgccatttgaaatctctcctcaggtcttaggcgctgatgccagtaattttcacatcagtgaaccactgacgatggccctgctgcttacgatagtgtttacgacgacgaaacttaacgattttaactttctcgccacgaccgtgagcaacaacttcagctttgattacgccgccatcaacgaaaggaacgccgattttgacttcttcaccgtttgcgatcatcagcacttcagcgaactcaacagtttcgccagttgcgatgtccagcttttccaggcgaacggtctgaccttcgcttactcggtgttgtttaccaccactttggaaaaccgcgtacatataaaactccgcttccgcgcacaccttttcaatgattcagagtgcgctataaatattcacaatagggcgcgaatattacgcaaaacgcacgcctttgacaagtgctacagtcaatacacgaagaaaaaaaacacaacttgtacggtaacgtttatctgtgccattttttcagtacaatcaccctatattcctaaccataaaccctaagttgcctttgttcacagtaaggtaatcggggcgaaaagcccggcttttgcgatgaatttagaaaaaatcaatgagttaaccgcgcaagatatggcgggtgttaatgcggcaatccttgagcagcttaattccgacgtccaactgatcaatcagttaggctattacatcgtcagcggcggcggtaaacgtattcgtccgatgattgctgtactggctgcacgagctgttggctatgagggaaatgcgcatgtcaccattgctgccctgatcgagtttatccacacggcgactctgctacacgacgacgttgtggatgaaagtgatatgcgcaggggtaaagctaccgccaacgccgcatttggcaatgccgccagcgtgctggtaggcgattttatttatacccgcgctttccagatgatgaccagcctcggtagcctcaaagtgctggaagtcatgagtgaagccgtaaacgtcatcgcagaaggtgaagttctgcaactgatgaacgttaacgatccggacatcactgaagaaaactacatgcgcgttatctatagcaaaaccgcgcgtctgtttgaggctgccgcgcagtgttccgggattctggctggctgtacgccggaggaggagaaaggcctgcaggattatgggcgctatctcggcactgctttccagttgatcgacgatttactcgattacaatgccgatggcgaacagttaggtaaaaatgtcggcgacgatctgaacgaaggtaaaccgacgctgccgctgctgcatgcgatgcatcatggcacaccagaacaggcacagatgatccgtaccgccatcgaacagggtaacggtcgccatcttctggaaccggttctggaagcaatgaacgcttgtggatctcttgaatggacgcgtcagcgtgccgaggaagaagcagacaaagccatcgcagcgttacaggtgctcccggacaccccttggcgagaagcactcatcggcctcgcgcacatcgctgttcaacgcgatcgttaatcccctcccctcatcccgcgcagcgcgcgggatggttccagtaagttccataaaaacacttattcagctctataacacctgaaaaatagggatgtgcatctttatatattctgaatattcacactctttacaggaactttttagagcaataggccatcaggagtatagtgatgctcgacagaagaagtgttctgaatgaaagcgactaacttaaggagtgaggaaaaatggaaagtaatttcattgactggcatcccgctgacatcattgcgggtttgcgcaagaagggaacgagtatggcggcggaatctcgcagaaatggtttgagttccagtacgctggcgaatgcattaagccgcccatggccgaaaggagagatgattattgcgaaagccctgggaactgacccctgggttatctggccaagtcgctaccatgatccgcagacccatgagtttatcgacagaacgcagttgatgcgtagctacactaaaccgaaaaaatgagtggtctggcggtagccccgcgaacggggctgccagctctcagacgattattcgcctttcacacgctcaatatttgcacctaaagcgcgcagtttgtcttcaatgcgttcgtagccacgatcgatgtgataaatacgatcaaccaccgtcgtcccttccgcaatacagccagccagcaccaggcttgcacttgcacgcagatcggttgccataacctgtgcgccagaaagtttttcaacaccgtgacaaataacggtattgctttcgatttcggcgtgcgcgcccatacggctcagctctggcacatgcataaagcggttttcaaagaccgtttcggtgataaacccggtcccttctgccaccaggttcaacagcgtgaactgggcctgcatatcggtcgggaatgccggatgcggcgcggtacgtacgttaacagccttcggacgtttgccatgcatatccaggctaatccagtcttcgccgacttcgatgtccgctccagcgtcacgcagtttcgccagcacggcgtcgagagtatctggctgcgcgttacggcagataattttgccgcgagaaatcgccgccgccaccaggaaagtaccggtttcgatacgatccggcagaacgcgatagacaccgccgcctaaacgttccacaccttcgatgacgatacgatcggtgccctgaccgctaattttcgcacccagcgtaatcaggaagttcgcggtatcgacgatttccggttcacgcgctgcgttttcaataatcgtggtgccttccgccagggttgcagcacacatgatggtcaccgttgcgccaacgctgactttatccatcacgatatgtgcacctttcaaacgaccatcgacggaagctttaacgtaaccttcttccagtttgatggtcgcgcctaattgttcgaggccagaaatgtgtagatcaaccggacgcgcaccgatcgtacaaccgccaggtagactaacttgcccctgaccaaagcgcgctaccagcggccccagcgcccagatagaagcacgcatggttttaaccagatcgtaaggtgcgcagaatacattaacgtcgcgggcatcaatatgcacagaaccattacgttctactttcgcacccagctggcttagcagcttcatacttgtatcgacgtctttcagtttcgggacgttctggatctctaccggttcttccgccagtagtgcggcaaaaaggataggcagagcagcatttttagcgccggaaattgtgacttcgccctggagcttcgttggcccctgaacacgaaatttatccatttagtttgttctcagttaacaattcatatccgctaccggcgaatcgcccatagctcaaaagccgttcagtttgcgatcgcgcgcccactccgcaggggtatacgctttgatgctcacagcatgaatgcggttatccgcaatatattccatcagcggaccatagaccgtctgctgttttttaacccgactcatgccgtcaaacaactcacccacggcaataacctgaaagtggctgccatcgccggaaacgtggacttcctggagggagagagcgttcatcaacacgctctgaatttcattattttccatgggatcttcaatcatcagttaataaaccagcgaaacatcttagagcaaagttgcgctggcataaataagcaaaaagcctcgctgataaatcagacaaggctcgacttgcaggcaggtttgccggacaggcggttaacgccatatccggcctgaaaaaatttaacgaggcagaacatcagcaggcaaattatacaatttcgccagggtatacactttgtcgtttaccccctgaagcgtcacattgttgccctgctttttcgccagatcgataagatggagcagcagtgccagtccccccgtatccacgcgggagacacggctaagatcgatgcaggtaatccccttcaccgcttcctcacgcatttcccaaagcggtagcaaaacgtcctgatccagctctccggataacgccagcgtgtcacccgtctgcatccagctcagactctcgctcattattttttctcttccagagtgattttctgttgagaaatgcttttcagttgcgcagtcaggccgtcgatacctttggtacgcagcagcgttccccactcgttttgtttggtggtgatcatactgacgccttcagcaatcatgtcgtaagcctgccaattgcccgtctgggagtttttacgccactggaagtccagacgcaccggcggacggccattcgggtcaataatggtaacgcgaataggcacaatggttttatcgcccagcggctgttctggcgcaatctgataggtttgaccgtgatacatcgccagcgcctgaccgtaagcctgcttcaggtactcacggaaagcggcaaagtaggcttcacgttgagcaggggtcgcactcttgtaatactggcccagcaccagcgcaccggcgtatttcacctgtacgtatggcagcagttcctgatcaacaatggtacgcagataatccgggttggcccgaatttgcggttgctcattcttcaggcgatcgaacgttttctgcgccgcctcgtccatcagcttatacggattggtctggtctgccgcggttgccgcactcagaggtgcaatcaccagcaaagcgaccatcattaaacgtttaaacatgcgtcggttctcctgaaattatttcgttgtacccacaggttcagtggtttcattattacctggcgcagcagctggcgcatcgccactattcttattgtcatcgcctttactaccgtaaaggaactgaccaatgagatcttccagcaccatcgcagacttagtgtcctgaattgtatcgccatccttcaggatagcagtccccagttccgggtcttcaaaaccgacgtttaatgccagatattgttcccccagcaggccggaagtacgaatgctcaggctactggtatctggaatgtggttataacgttgttcaatttccagcgttacgcgcggcagataggttttcgggtccagcgtaatatccgccacccgacccacaacaacgccaccaatactgaccggagagcgcgctttcaggccgccaatgttatcgaacgtcgcataaagcgtgtaggtcggttcagtacgtatggacgtcacgttcgccgccttcaggcaaacaaacagcgccgccagcagtgctgctaataaaaagatacccacccaaatttcattttttttcgtttgcatgaactcaattcccaaacatcaatgcggtcagcacaaaatccagccccagaacagccagagagctgtggacaacggtgcgagtggttgcccggctaatcccggcagacgtcgggatggcgtcgtagccgttaaacaagctaatccacgtcaccgtgatggcgaacaccacgctcttaatcagacagttgaccagatccatacgccagtcgacggcattttgcattgcgctccagaagaacccgctatcaatgcctttccaactgacgccgaccagagatccgccccagatccccacggcgacgaaaataaccgtcaacagtggtaaactaataaccccagcccagaaacggggagaaataacccgacgcagcggatccaccgccatcatctccatactggagagttgctctgtagcgcgcatcaggccgatttctgcggttagcgcgctaccagcacgcccggcaaacaacaacgcggcaaccaccggccccagttcacgcagtaggcttaacgccaccagcatacccagactggtttccgcactataagtggtcagaaccagataaccttgcagccccaacaccattccgatgaacacgccagaaaccacaataatcagcatgctcaggacgccgacattatagagctggcgcaccagcagcggcgcatgtttgcgaaattccggtttgccgaccagcgcattgaataacattaacccggcccgcccgaacgttctcagggttttaatccctttatgtccgaggctcgccagcgcatttaacagcatgagtggcttaactccctggtaaaagatcagcgtgataatcgccggcaggatagcggaacggaacaggcccgtcagctatcccgtccagaaactgacgtacgcgcggatcaggattcgcctgcaacgcctgggcactgccatgagcgacaatttttttgtccgccaggatccaggcgtgatccgcaatacttaacacttccggcacatcgtgagaaaccaccacacaagtcacgcccagcgcgctgttcagctcagaaatcagcttcaccagtacgcccatggtgatgggatcttgcccaacaaaaggttcatcaaacatgatgagatccggctccagcgcaatcgcacgcgccagcgctgcacgccgcgccatcccaccggaaagttcagaaggcattagtttagccgctccacgcagccccacggcctccagcttcatcatcaccgtactatgcaacaatggcgcgggaagttgggtatgttcgcgcagtggataggcgacgttgtcaaatacgttcatatcagtgaacaacgccccggactgaaataacatgctcatccgtttgcgcactgtatacaggcggctacgagacatcgccggaatattctcaccatcgaaaaggatctcaccatgatctggtgcgatttgcccgccaatcagacggagtagcgtcgttttaccgatgccgcttggccccatgatcgccgtgatcttccctcgcggcacggtcagggaaatattatcgaagatgcagcgattgccacgcgtaaaactgacatcgcgcatatcgactaaattcgccacagactgctccataattcacccttcgtcttgcgttgattttctaagcatggcgctcaatttaaccttgaacccaacatatttacagaatattacccgccgtggttagcgaaagctggcatttgttttactttttagccgcataaagtcaaaattaagcatccgttacggctttctgaaaatcttcagcggaccggcgagtatacctgaagaaaggacgttagatgcttttagctacggcactgttaattgttggtttacttttggtcgtttacagtgccgaccgcctggtttttgccgcgtctattctttgccgaacctttggcatcccgccgctgatcatcggcatgacggtggtcagtattggtacaagcttaccagaagtcatcgtcagccttgccgcgtctctgcacgaacaacgcgatttagccgttggtacagccctcggcagtaacattatcaatatattgctgatcctcggtctggctgcgctggttcgtccttttaccgtccattctgatgttctacgccgtgaattacccttaatgttgttggtcagcgtggtggccggttccgtactctatgacggacaacttagtcgcagcgatggtatctttctcctctttctggctgtgctatggctgctgttcattgttaaacttgcacgtcaggctgaacgtcaggggactgacagcctgaccagagagcagcttgcagagctgccgcgtgacggcggattgcccgtcgcgtttttatggctcggcattgcgcttatcatcatgccagtggccacgcggatggtggttgataacgccacggtgctggcgaattactttgccatcagcgagttgacgatgggtctgacggcaattgctatcggaaccagcctgccggaactggcaaccgcaatagcgggggttcgcaaaggtgaaaacgacattgctgtcggaaatatcattggcgcaaacatttttaatattgtcatcgtgttgggtttacccgcgctgataacgccaggagagattgatccactggcgtacagtcgtgactacagcgtgatgttgctggtgagcattatttttgcgttgctgtgctggcggcgctccccgcaaccgggccgtggtgtaggggtattattaactggcggatttatcgtatggctggcgatgttgtactggttaagcccaatactcgttgaataactggaaacgcattatgagccacgtagagttacaaccgggttttgactttcagcaagcaggtaaagaagtcctggcgattgaacgtgaatgcctggcggagcttgatcaatacatcaatcagaatttcacgcttgcctgtgaaaagatgttctggtgtaaagggaaagttgtcgtcatggggatgggaaaaagcgggcatattgggcgaaaaatggcggcaacgtttgccagcaccggtacacctagttttttcgtccatcctggtgaagccgcgcatggtgatttaggcatggttaccccacaggatgtggtgattgctatctctaactctggtgaatccagcgaaatcacggccttaattccagtgcttaagcgtcttcacgtaccgttaatctgcatcaccggtcgcccggagagcagcatggcgcgcgccgcagatgtgcatctgtgtgttaaagtagcgaaagaagcctgtccgttagggctggcaccgaccagcagcaccaccgccacgctggttatgggcgatgccctcgctgtcgcgctgttaaaagcacgcggctttactgctgaagattttgcgctcagtcacccaggcggcgcactgggtcgtaaacttctgctgcgcgtaaacgatattatgcatacgggcgatgagatcccgcatgttaagaaaacggccagtctgcgtgacgcgttgctggaagttacccgcaaaaatcttggtatgactgtcatttgcgatgacaatatgatgattgaaggcatctttaccgacggtgatttacgccgtgtcttcgatatgggcgtggatgttcgtcagttaagtattgccgatgtgatgacgccggggggaatacgtgtgcgccctggcattctggccgttgaggcactgaacttaatgcagtcccgccatatcacctccgtgatggttgccgatggcgaccatttactcggtgtgttacatatgcatgatttactgcgtgcaggcgtagtgtaaagattcaaggataaacaacaatgagcaaagcaggtgcgagccttgcgacctgttacggccctgtcagcgccgacgttatagcaaaagcagagaacattcgtctgctgatcctcgatgtcgatggcgtactgagtgatggcctgatttatatgggcaataatggcgaagagctgaaagcgttcaatgttcgtgacggttatggcattcgttgtgcgctcacctctgatattgaagtcgctatcattaccgggcgaaaggctaaactggtagaagatcgttgtgccacattggggatcactcacttgtatcaggggcagagtaacaaactgatcgcctttagcgatctgctggaaaaactggcgattgccccggaaaatgtggcttatgtcggcgatgatctcatcgactggccggtaatggaaaaagtgggtttaagcgtcgccgtggccgatgcgcatccactgttgatcccgcgcgccgattacgtgacgcgcattgctggcggtcgtggcgcagtgcgcgaagtttgcgacttattactcctggcgcagggcaaactggatgaagccaaagggcaaagcatatgagtaaagccagacgttgggttatcattgtgctaagtctggcggttctggtgatgatcggcattaatatggccgaaaaagacgataccgcccaggtggtcgtcaacaacaatgatcccacctataaaagcgagcatacggacacgctcgtctataacccagaaggggcactaagctatcgattgattgctcaacacgttgaatattattccgatcaggccgttagctggtttacgcagccggtacttaccacgtttgataaggataaaatcccgacatggtccgtaaaagcagataaagccaagctgaccaatgaccggatgctctatttatatggacacgttgaagtcaacgcacttgtgccagactctcaacttcgcagaatcacgacggataacgcgcagatcaatctggtgacgcaggatgttacctctgaagacctcgtcacgttatacggaacaacatttaactccagcggtctgaaaatgcgcggcaacttacgcagcaagaacgccgagctgattgaaaaggttagaacatcctatgaaattcaaaacaaacaaactcagccttaatcttgtgcttgccagcagtcttctggccgccagcattccggcatttgccgtaaccggagacactgatcagccgatccacattgaaagcgaccagcaatctcttgatatgcaaggcaacgtggttacctttaccggtaatgtcatcgtcacccagggcaccatcaaaattaatgccgacaaagtggtcgttacccgtccgggcggcgaacaaggtaaagaagtgattgacggctacggtaaaccggcaacgttctaccagatgcaggacaacggtaaacccgttgaaggtcacgcttcccagatgcactacgaactggcaaaagattttgtcgttctgacgggtaatgcttatctgcagcaggtcgatagcaacattaagggcgataagatcacttacctggtgaaagagcagaaaatgcaggctttcagcgacaaaggcaagcgcgtaacaaccgttctggtgccgagccagctgcaggacaaaaacaacaaaggccagaccccggcacagaagaagggtaattaattcgttatggcaacattaactgcaaagaaccttgcaaaagcctataaaggccgtcgcgtggtagaagacgtcagcctgaccgtcaactccggggaaattgtcggtctgctggggccaaacggtgccggtaagaccaccactttctacatggttgtaggcattgtgccgcgcgatgcgggcaacatcattattgatgatgacgatatcagtctgctgcctctgcatgcacgcgcgcgccgcggtatcggctatctgccacaggaagcctccattttccgtcgcctcagcgtttacgataacctgatggcggtactgcaaattcgtgacgacttgtctgctgaacaacgtgaagaccgcgcgaacgagctgatggaagagtttcacattgagcacctgcgtgacagcatggggcagagtctctccgggggtgaacgtcgccgtgtagaaattgcccgcgcactggctgcgaatccgaaatttattctgctcgacgaaccgtttgccggggttgacccgatcagcgttatcgacattaaacgcatcattgagcacctgcgcgacagcggcctgggcgtgctgatcactgaccacaacgtgcgtgaaacactggcggtttgtgaacgcgcttatatcgtcagtcaggggcatttgatcgcccacggcacgcctacagaaatcttacaagacgaacacgttaagcgtgtataccttggggaagacttcagactctgatagggtagaagtttgcgacgttttagcaggagagtacgattctgaacatgaagcaaggtttgcaactcaggcttagccaacaactggcgatgacgccacagctccaacaggcaattcgtctgttgcagttgagcacgctggaacttcagcaggagctacagcaggcgctggagagtaatccgctgcttgagcaaatcgacactcatgaagaaatcgacacccgcgaaacgcaagacagtgaaacgctggacaccgccgacgcgctcgaacaaaaagagatgccggaagagctgccgctcgatgccagttgggacaccatttacaccgctggtacaccatccggcaccagcggtgactacattgacgacgagctgccggtctaccagggcgaaacgacgcagaccttgcaggattacctgatgtggcaggttgagctgacaccgttttccgacactgaccgcgctattgctacctctatcgtcgatgccgttgatgaaaccggttatctgactgtcccgctggaagatattctcgaaagtataggcgatgaagagatcgacatcgacgaagttgaagccgtccttaagcggatccaacggtttgatccggtcggtgtggcggcaaaagatctgcgtgactgtctgctgatccaactctcccaattcgataagaccacgccgtggctggaagaggccagactgatcattagcgatcatctcgatctgttagccaatcacgacttccgcactttaatgcgcgtcacgcgtctgaaagaagatgtgctgaaagaagccgtcaatctgatccagagcctcgatccgcgccccgggcagagcatccagactggcgaacctgagtatgtcattccagatgtgctggtgcgtaagcataacggtcactggacggtagaactcaacagtgacagcattccgcgtctgcaaatcaaccagcactacgccagcatgtgcaataacgcgcgcaacgatggtgacagccagtttatccgcagcaatctgcaggatgccaaatggttgatcaagagtctggaaagccgtaacgatacgctactgcgcgtgagtcgctgtatcgttgaacagcagcaagccttctttgagcaaggtgaagaatatatgaaaccgatggtactggccgatatcgcccaggctgtcgaaatgcatgaaagcacgatatctcgcgtgaccacgcaaaaatacctgcatagtccacgaggcatttttgaactgaagtatttcttttccagtcacgtcaataccgagggcggcggcgaagcttcctccacggcgattcgtgcgctggtgaagaaattaatcgcggcggaaaacccagcgaaaccgttgagcgacagcaagttaacctctttgctgagcgaacaaggtatcatggtggcacgccgcactgttgcgaagtaccgagagtctttatccattccgccgagtaaccagcgtaaacaactcgtttgacccaaccgataaggaagacactatgcagctcaacattaccggaaataacgtcgagatcaccgaggcactgcgcgaatttgttacagccaaatttgccaaacttgagcaatattttgaccgaatcaaccaggtctatgttgttctgaaagtggagaaagtcacccacaccagtgatgcaacactgcatgtaaacggtggtgaaattcatgccagcgcggaaggtcaggacatgtacgctgccattgatggcttaattgataagctggcacgccagttgaccaaacataaagataaactgaaacaacactaattgtccgggcaattagcatgtgcatggcggtctgttgtgcggcacaacgggccatttgtacggttaatgctccgagcctgttccactgtttgagtgggcaggttcttaggtgaaattatgacaaataatgatacaactctacagcttagcagtgttcttaacagggaatgtacgcgaagccgcgtccactgtcagagcaaaaaacgcgccctggaaatcatcagcgagctggcggcgaaacaacttagcctgccgcctcaggtggtttttgaagctatcctgacgcgggaaaaaatgggcagtaccggtatcggcaatggtattgccattccgcatggcaaactggaagaagatactctgcgcgccgttggcgttttcgttcagctcgaaacgcctatagctttcgatgccatcgacaaccaaccggtggacttactttttgccctgctggtgccggcagaccaaactaaaacgcacctgcatactctgagcctggtggcgaaacgtctggcggacaaaaccatctgccgccgtttacgcgcagcccagagcgatgaagagctgtatcaaatcattacggataccgaaggtactccggatgaagcgtaattattcggtaatgtctcttttagacgttgtgaggagaaacagtacatggtactgatgatcgtcagcggacgtagtggtagtggtaaatctgtcgccctgcgtgcgctggaagatatgggtttttactgcgtggataaccttcccgtagtgttgttacccgatctggctcgaaccctggccgatcgcgagatttctgccgccgtcagcattgatgttcgtaatatgccggagagtccagaaatattcgaacaggcgatgagtaacctgcctgacgctttcagtccgcaactcctgttcctggatgccgaccgtaataccttaattcgtcgttacagtgacacgcgccgactgcatccgctttccagcaaaaacctgagcctggaaagtgctatcgacaaagaaagcgatttgctggagcctctgcgtagccgagcggatctgattgtcgataccagtgaaatgtccgttcacgagctggctgaaatgctgcgtacccgtctgctgggtaaacgtgaacgcgaactgaccatggtctttgagtctttcggcttcaaacacggtatccctatcgatgcagattacgtctttgacgtgcgcttcttgccgaacccgcactgggatccgaaactgcgtccaatgacaggtcttgataaacctgtcgccgcgttcctcgaccgccacacagaagtacacaattttatctaccagacgcgaagctatcttgagctatggttacctatgctggaaaccaacaaccgtagctacttgacggtcgccattggttgtaccggcgggaagcaccgtagcgtgtatattgcagagcaactggcagactacttccgcagccgcggtaaaaacgtccagagtcgccatcgtacgctggaaaaacgtaaaccatgaccgtcaagcaaactgttgaaatcacaaacaagctgggcatgcatgcccggcctgcaatgaagctgtttgaattaatgcagggttttgacgctgaagtgctcttacgtaatgacgaaggcaccgaggctgaagccaacagcgttattgcgctgctgatgttggattctgccaaaggacggcagattgaagttgaagcgaccggtccacaggaagaggaagcactggccgccgttatcgccctctttaattctggttttgatgaagattaatcttcatcactttgacatacaactcccttcaaactccccccgacaataagaaaatcacgtactgaaatcgttctcaatcaacgtcatttgtacattttgtgcgcttttcactttcagaagaaccttaagaaaaccttaagaggcattgtttaggttttgtttaagttaatcgaccatactggagatcgtcagaaaatatttccaggagatggcatgattcgcttatctgaacaaagtcccctgggcaccggaagacatcggaaatgttatgcgcatccggaagatgcccaacgctgtatcaagattgtctaccatcgtggcgatggtggcgataaagagatccgccgtgagttaaagtactacgcgcatcttggtcgccggttaaaagactggagtggaataccgcgctatcacggtaccgttgagacggattgcggaaccggttatgtctacgatgtgattgcagattttgacggcaagccttccattacgctgaccgaatttgctgaacaatgccgttacgaagaagacattgcacaactgcgccagctactgaaacagctgaagcgttatttgcaggataaccgtatcgtgacgatgagcctgaagccgcagaatatcctctgtcaccgcatcagtgagagtgaggttatcccggtcgtctgcgacaacattggtgaaagcacattgattccactggcgacctggagcaagtggtgttgtctgcgtaagcaagagcggttatggaaacgatttatcgcccaaccggcgctggctattgccctgcagaaagatctgcaacctcgtgagagcaaaacgctggccctcactagccgcgaagcttaatccagctggtgttgttgcataaacggctcaccgcctaactgatacatctgccgtaaaatccacgcctgacggctacgcacgtagccgcttgggctggagactttgaaacgaagtggattaggtaatacagctgccagtaatgcagcttcgctccgggtaagtttgctcgcgggtttgtggaaataacgttgtgccgcagcttcgacgccaaacacaccgtcgccaaattcggcgatattcaggtaaaccgtcaggatacgctttttgctccagaccgtttctatccccagcgttaatccggcttccagcccttttcgaacccagctacgcccatcccataaaaagagatttttggctgtctgttgagaaatcgtactagcaccgcgaatacggttttcattgcgctcgttgtgcgccagggctttctcaatggaagcgacatcaaagccccagtgctcaggaaatttctgatcttctgcggcaatcaccgccagtcccatccacgggctgatttgatccatactgacccagtcagaatgtgccacgtaacgaaaattgccatgcagccaggcgctgacctgtcgctcgaccattaccgcactgaagggaacaggcgcaacgctaaacaacgcgatgcccccgccccagaaaacggcgaggacaaccattaaccgcaaaagaaaacggcgaacgaaactaaacaccgttaagcggcttttactcattcagccagaaccagcacgcgggaaaccagcttatcaatgccgctcgccgcttctgcaatgttctgcgccagcatatatgctggggtggtgacaatcttattgtcttcatcaaccacgatatcatcgacaggacacggcacatgctccgcgcccatctcttccagcacttctgcggtatcgatatcagtaccgatggtcaaacgcagcgggaaatcgaaaattttcggcagcatcgccggggcaatacacataaaaccaagcggttttccggcctgatgcatcgcttgtgccagcgcctttaattcacggtcaacggtgcattcgctaccaagactggcaaaattgcttaaattcttcgccgcgccaaaccccccccggcacaatcaacgcatccagttcagcggcatcggcctgggccagaggacggatttcaccgcgcgttattcgtgccgcttcaatcagcacattgcgcgtttccgtcatcgcttcgccagttaaatggttgataacatcaacctgctgcttatccggtgcaaagcagaccgcctgcgcaccgctgcgactaatagctaacaacgtcaacaccgcttcatgaatttcagaaccgtcatagacgccgcatccgctcagaattacgccaattttcttcattgtgatcatcctttcgcaattgactgaaacacattaatttttttaataaaaatggtacgcatcacacatttaactgattcatgtaacaaatcatttaagttttgctatcttaactgcgtgcggcctgaaaaacagtgctgtgcccttgtaactcatcataataatttacggcgcagccaagatttccctggtgttggcgcagtattcgcgcaccccggtctagccggggtcattttttagtggcttttgccacccacgctttcagcacttctacgtcgtgacgccactcttctttcatctcttcaatccattcaccgacgttatcttcccaggccggaaggtcaggagactgaatttgctgacccagctgttgcagatggcgtaaccccacactccccgccgcacctttaattttatgtccttcctcaacaatgccttttttatcctgcgccgtcagattgctctccagcacgctgacatagcccggcatcatcttctcaaacaccgctaacccgtcggtgatcagcttcggtcctacaagttcgagatactgttccagcatgggaatatcgagcaatgcttcacttttactgttctcttctgtcgtcaccgtactctcctcatcatcctgggtatcccagaatttcttgatcatcgcggttagcgccggaacagaaagcggcttactcagcacatcatccattccagcattgaggtactcttgtttgtctttcagcacgttagcggttaaggccaccagcggcggtaaatcctcgcgcggataacgtttcgtcagttcacgagagatatccagcccggtcatatctggcaactgaatatccagcaacaccaggtcgtattcgcccggtttaaacatctccagcgccgccttgccggtcatggcgacatcaacgctgttacctaatttttccagcacagaacgcgcaacaatcacgttcagttcaatgtcttccaccagcagcacattcagcgccggtaaaggcatatcgtcttcatcaaacgcatcatcgacctcttctgctacgctcggtgcgtggatcgtcaacgtaaaggtactacctttgccctgttcgctggtaaccgtaatatcgccgcccatatttttcgccagacgacgagaaacggccagaccaataccggtgccggtggcaggtttaccgccatgactgtctttcacctggtaatacatggcgaaaattttatccagctcatcctgcggaatgccgataccagagtcttccacttcaaaatgcagcatatcgccttcatcgtagcgcacgcgcacggtaacctggccttgctgggtgaatttgacggcgttactgatgaggttccacaggatctgccgtaaacgcgtcccgtcggtaatgacctgatgcggtaatggcagcgtcggctccaggttaaagcgcaatcctttttgttgcgcctgcaatgcggagagattttccagatcggcaaggaagctggtgaaatcaaccggttgattatcaagctggaccttgcgccgttccatcttatccatgtcgataatatcgttaaagatattccccagcgtgacggcgctaacatggatggtcttgagatatttttcctgctcggcggtgagttcggtatccagcagaatgcggctcagaccgacgataccgttcagcggtgtacgcaattcgtgactgatggtggagataaacgtcgttttgtcgcggctggcccgttcaagcgcatcctgataccgcttacgctcggtaatgtcgcgaccaaagcccatcaaaccgtgacgtttacccacgcggtcgtagtacggcactttacggatttcaaagcaggctttgcgcccgtccgggtaatccagccactgttcataggtcagactcacattatgacggaacactttttcatcggtttcaatgacttttgcggcggcttccggactgtaaacatcagcaggtttcaggtgaaccagttgtttttcgctttttccggtcagcagctccatcgcgcggttacagccggaaaactctttatcttcgttacgataaaaaaccaggtcgggactagcatcaaggaaggaacgtaagaaactggattgctgctcgagctgaatttgtgtctcttcgcgctctttgatttcaattttcagttggccgaaggtttcctgcagttctgcttccgctttttcacgaacggcaatttcctgatttagctgggcaatattatcttttaactgaacgttgaggctcaaatcgcgctcgcgcatctcctccagtttttgcaccagccgactcagacgttgtcgactctcctccagttgctcgacgaccacgcttagaaagtagaccgcccacggcgtaatcagcaaaccaaagaagatagaacgaataacatcaatgctttcgacctgaccatgcagcaccatggttaccgccatttgtaccacaatggcaagaacgacgagggccagcgccagcaacatactgaagcgcaccagacctaacttcatcatcaggtcaacataatactgcgccagcagacgaatttgcttcattagggaattccttcacgacaacctgccccaataatacccaattctgacagttacgttataaattgtgtgagaaatgcggaattcccctcaacgacttactccgttggaggtagccacggacgtcccagcgcgcttccctgtacgccatgttcattcagatagcgatccagctcgaccattcccgtccatcgattttcgcaccacagcggagcaagcagcgtcgggcgacgggcgctggcggaaatgcggtggtagatcacttccggtggcgtatggcgaatcatttctccggcagtgagcgtgtaatcctccagttcaataccgttcaaacgccccgcttcccaggctttcgccataatgctgcctttcacaatatgcagcggatgcagctttatgccgtccacgccggtttcaaccactcgctccagcgtttgcaaacattcagcctgcccttcgccaggcaggccgacaattaagtgggaacacaccttcagcccgcgctgacgtgccagctgggttgtacgctgataacaggcaaaatcatggccgcggttgatgcgatgcagtgttttgtcgtgggcggtttgtagccccagctccagccacacttcgtaaccctggtccttatattcgcaaagcagatccagcaccgcatccggcacgcagtccgggcgggtacccacacacaaaccgacaatattggcctggctcaccgcctgctgatacatagaacgcagcacctgaacttccgcaaaggtgctggtatacgcctgaaagtaggccagatagcgtttagcgcggttaactaaattcgcctggtgcgccagttgctcggcaatggaacgatgctgctgcgcttcatcggcaaagctggcaacattacagaatgtgcagccaccacgcccgatggtaccgtcacggttagggcagctaaaaccgccgtgcagcgtcagcttatgcaccttttgcccataacgacgggtgagatcaccaccaaacatattgactaatttctgtaactgcataatctgatagaccgcgccttgaaaagaggccaaagcctgccatttttagctcaattcggcgatgacctggatcaatcgtcccggcctgcttttatcaactgcataatcaatcaaaattaccgaaatttcatgcataatcacataaatcacttttgcttatcttgtgtcagatttttttatctcctgatggattttaggcaaaaacagtagcatgaaacgtcattaccaattaaggcagtataaaatgctggttttgtcgtcagttcaaggcaggataagggttaacacacctttatgacagtcaggaattgactgtttctctaacgacttcccttttagccttaaagataaaatccattttaatttcagtcatttaataaagaattttgcgctaaagcacatttctgtaccaataagcttgccatttgacctgtatcagctttcccgataagttggaaatccgctggaagctttctggatgagcagcctgctcatcatatttatgcagtaattgagatcccctcttcaccgtattaaccgatgcgaaaaggacaacaagggggcgaatgcgaggcgcgcgtatgacacgcaaaccccgtcgccacgctctttctgtgcccgtgcgcagcggtagcgaagtggggttcccgcagagcctgggggaggttcacgatatgttgtacgataaatcccttgagagggataactgtggtttcggcctgatcgcccacatagaaggcgaacctagccacaaggtagtgcgtactgcaatacacgcactggcccgcatgcagcaccgtggcgcgattctcgccgatggtaaaaccggcgacggttgcggcttgctgttacaaaaaccggatcgcttttttcgcatcgttgcgcaggagcgcggctggcgtttagcaaaaaactacgctgtcgggatgctcttcctgaataaagatcctgaactcgccgctgccgcacgccgcatcgttgaagaagaactgcaacgcgaaaccttgagcattgtgggctggcgtgatgtccccactaacgaaggcgtgctgggtgaaatcgccctctcctctctgccacgcattgagcaaatttttgtgaacgccccggcaggctggcgtccacgcgatatggagcgccgtctgtttatcgcccgccgccgcattgaaaagcgtctcgaagccgacaaagacttctacgtctgtagcctgagcaatctggtgaacatctataaaggtctgtgtatgccgacggatctgccgcgcttttatctggatcttgcggacctgcgtctggaaagcgccatttgcctgttccaccagcgcttctccactaacaccgtaccgcgctggccgctggcgcaaccgttccgctatctggcgcataacggtgaaatcaacaccatcaccggtaaccgccaatgggcgcgtgcgcgtacttataaattccagacaccgcttatccctgacctgcacgacgccgcaccgttcgtcaacgaaaccggctctgactccagtagcatggataacatgctggaactgctgctggcaggcgggatggatatcatccgcgccatgcgtctattagtaccacccgcctggcagaacaacccggatatggacccggaactgcgtgccttctttgactttaactccatgcatatggagccgtgggatggcccggcgggcatcgtgatgtccgacggtcgttttgccgcctgtaacctcgaccgtaacggtctgcgtccggcgcgctacgtcatcaccaaagataagctcatcacctgcgcctctgaagtcggtatctgggattaccagcctgacgaagtggtcgaaaaaggccgcgtcgggccaggcgaactgatggttatcgacacccgcagtgggcgtattctgcacagcgcagaaaccgatgacgatctgaaaagccgccatccatataaagagtggatggagaaaaacgtccgccgactggtaccgtttgaagatctgcccgatgaagaagtgggtagccgcgaactggacgacgacacgcttgccagctaccagaaacagtttaactacagcgcggaagagctggactccgtaattcgcgtactgggcgaaaacggtcaggaagcggtcggtagcatgggcgatgataccccattcgccgtgctctccagtcagccgcgcattatttacgactacttccgccagcagtttgcccaggtgactaacccgccaatcgacccgctgcgtgaagcgcatgttatgagcctcgccaccagtatcggtcgtgaaatgaacgtcttttgcgaagcagagggccaggcgcaccgtttaagctttaaaagcccgattctgctctactccgatttcaaacagctcacgacgatgaaagaggagcactaccgcgcagatacgctggatatcacctttgacgtcactaaaaccacgctcgaagcgacagtcaaagagctgtgcgacaaagccgaaaaaatggtacgtagcggcaccgtgctgctggtgctctccgaccggaatatcgctaaagatcgcctgccggttccagccccgatggcggttggcgcgatccagacccgtctggtcgatcaaagcctgcgttgcgatgccaacatcatcgtcgaaaccgccagcgcccgcgatccgcaccacttcgccgtgttgctgggcttcggcgcgacggctatttatccataccttgcctatgaaacgctgggccgcctggtagacacccatgcgattgccaaagattatcgtaccgtgatgctcaactaccgtaacggcatcaacaaaggcttgtacaaaatcatgtccaaaatgggcatctccaccatcgcctcttaccgctgcagcaaactgtttgaagcggtcggtctacacgatgatgtagtgggcctgtgcttccagggggcggtcagccgcattggtggagcaagctttgaagacttccagcaggatctgctgaatctgagcaaacgtgcctggctggcgcgtaagcccatcagccagggcggtctgctgaaatacgtccacggcggcgaataccacgcctacaacccggacgtggtgcgcacgctgcaacaagcggtacaaagcggcgagtacagcgactatcaggaatacgcgaagctggttaatgagcgtccggcaaccacgctgcgcgatctgctggcaattacgccgggtgaaaacgcggtcaacattgctgatgttgaaccggcaagcgaactgtttaaacgctttgataccgccgcgatgtctatcggcgcgttaagcccggaagcccacgaggcgctggcggaagcgatgaacagcatcggcggtaatagcaactccggtgaaggcggcgaagacccggcgcgctacggcaccaacaaagtgagccgcatcaagcaggtggcttccggtcgctttggggttactccggcgtatctggtcaatgccgacgtcattcagattaaagtcgcccagggcgcgaagccaggcgaaggcggtcagttgccgggtgataaagtcacgccttacatcgccaaactgcgctatagcgtgcccggagtgacgctgatctccccgccgccgcaccacgatatctactctatcgaggacttagcgcagctcattttcgacctcaagcaggttaacccgaaagcgatgatctccgtgaagctggtttccgaaccgggagtaggcaccatcgcgactggcgtggcaaaagcttatgcggacttgatcaccatcgcaggctatgacggcggcaccggcgcaagtccgcttagtagcgtgaaatacgcaggctgtccgtgggagctggggcttgttgaaacccagcaggcgctggttgctaacggcttgcgtcacaagatccgtttgcaggtcgatggcggcctgaaaacgggtgtcgatatcatcaaggcggcgattctcggcgcagaaagcttcggcttcggcactggcccgatggtggcgctcggctgtaaatatctacgtatttgccatctgaacaactgcgcaacgggtgtagcaactcaggatgacaaactgcgtaagaaccactatcacggcctgccattcaaggtgacgaattactttgagtttatcgcccgtgaaacccgcgagctgatggcacagcttggcgtaacacgtctggtggatctgattggtcgcaccgacctgctgaaagagctggacggtttcaccgccaaacagcagaagctggcgctgagcaagctgctggagactgccgaaccgcatccaggtaaggcactctactgcaccgaaaacaacccgccgtttgataacggcctgctgaacgcgcagttgctgcaacaggcgaaaccgtttgtcgatgagcgccagagcaaaaccttctggttcgatattcgcaacaccgaccgttctgtcggcgcgagccttagtggctatatcgcccagacgcacggcgatcaggggctggcagccgatcctatcaaagcgtacttcaacggcaccgcaggccagagcttcggcgtgtggaacgcgggcggcgtggaactgtacctgaccggtgatgccaacgactatgtcggtaaaggcatggcgggcggcttaatcgccattcgtcctccggttggttccgccttccgcagccatgaagcaagcattatcggcaacacctgcctgtatggcgcgaccggtggtcgtctgtatgccgcaggccgcgcgggtgaacgtttcggcgtgcgtaactccggtgctatcaccgtggtagaaggcattggcgacaacggttgtgaatatatgacgggtggtatcgtctgcattctgggtaaaaccggcgttaacttcggtgcgggcatgaccggcggtttcgcttacgttctcgatgaaagcggcgatttccgcaaacgcgttaacccggaactggtcgaggtcttaagcgttgacgctctggcgatccatgaagagcatctgcgtggtcttatcaccgagcatgtgcagcataccggctctcagcgcggtgaagagattctggcgaactggagtaccttcgccactaaatttgcgctggttaaaccgaagtccagtgatgtaaaagcactgctgggtcaccgtagtcgtagcgcagctgagttgcgcgtgcaggcgcagtaaggggtagcaacaatgagtcagaatgtttatcaatttatcgacctgcagcgcgttgatccgccaaagaaaccgctgaagatccgcaaaattgagtttgttgaaatttacgagccgttttccgaaggccaggccaaagcgcaggctgaccgctgcctgagctgcggcaacccatactgcgagtggaaatgcccggtacacaactacatcccgaactggctgaagctcgccaacgaggggcgtatttttgaagcggcggaactgagccaccagaccaacaccctgccggaagtttgcggacgagtctgcccgcaagaccgtctgtgcgaaggttcctgcactctgaacgatgagtttggcgcggtgaccatcggcaacattgagcgctatatcaacgataaagcgttcgagatgggctggcgtccggatatgtctggtgtgaaacagaccggtaaaaaagtggcgattatcggcgcaggcccggcaggtctggcgtgtgcggatgtcctgacgcgtaacggcgtaaaagccgttgtcttcgaccgtcatccagaaattggcgggctgctgaccttcggtattccggccttcaagctggaaaaagaggtaatgacgcgtcgccgtgaaatcttcaccggcatgggtattgaattcaaactcaataccgaagtgggccgcgacgtacagctggacgatctgctgagtgattacgatgccgtgttccttggcgtcgggacttatcagagtatgcgcggcgggctggaaaacgaagacgccgatggcgtgtacgcagcgctgccgttcctcatcgccaacaccaaacagttaatgggctttggtgaaacccgcgacgaaccgttcgtcagcatggaaggcaaacgcgtggtggtccttggcggtggcgacactgcgatggactgcgtgcgtacgtccgtgcgccagggagcgaagcacgttacctgtgcctatcgtcgtgatgaagagaacatgccgggttcccgccgcgaagtgaaaaacgcgcgggaagaaggcgtagagttcaaattcaacgtccagccgctgggtattgaagtgaacggtaacggcaaagtcagcggcgtaaaaatggtgcgtaccgaaatgggcgaaccggacgccaaaggccgtcgccgcgcggagatcgttgcaggttccgaacatatcgttccggcagatgcggtgatcatggcgtttggtttccgtccacacaacatggaatggctggcaaaacacagcgtcgagctggatagtcaaggccgcatcatcgccccggaaggcagcgacaacgccttccagaccagcaacccgaaaatctttgctggcggcgatatcgtccgtggttccgatctggtggtgaccgctattgccgaaggtcgtaaggcggcagacggtattatgaactggctggaagtttaagcgaggtaacaatgaattcgccagactgtgtctggcgaatcaaattactgacgaagtgcgcgttgttttctggcaaatgcggcatgagcgtttgacctttcctataatagggataattttcaataaattgtgctttgttcaccaagtctgatgagtgaagcacatcaagcaatttctcatttacaatccgtctcaattacttgttaacacctctgacaataccgattctgcaagctattcagtcttttcattccatgtaaattgtctcgatattaatatacaaaatatgaatataaaaaaccaatatattatccttaattatctatatattttcctatttttcagcgcaaacattcatgtaatgaataattatcaccacaaaccacctcaccagcaccttattattcacatgatcgtaactataaaattcattaaataaatacaccccagcaagttggctatttctgaacgagttatttatttacattcacaaacagatatatatactgcttcagctttttattttaaaaaataaatttgttattaaggatatgttcatatgtttttcaaaaagaacctcacaacagctgctatttgtgcagcactttctgttgcagcattcagtgccatggcaacagatagtactgatacagaattaactatcatcggcgagtatacccctggtgcatgtaccccagttgttacgggcggcggcattgttgactatgggaaacatcataacagtgcgctgaatccgaccggtaaaagtaataaactggttcaactgggccgcaaaaacagcacattaaatataacctgcacagcaccaacgctaattgctgtaacctccaaggataaccgtcagagcaccattgtagcgttaaacgacacatcctatattgaaaaagcttatgatactctcgtagatatgaagggaacgaaaaacgcctttggtttaggttctgcgcctaatggacaaaaaattggcgctgcatccattggtattgacaggtctaatggtgggattcacgcggcggacgatacaggtgaaattcctgtcgacctgattcaaactgaccactggagtgcagcgacccccacatggaaagccagttctaatggcgcattctgcagcctgacaagttgcagtgcaatcgagcgcggttattctgttgcaaaaacaggggaactgacacctgttgctattacagcggtcaccttcccgttactgattgatgctgcggtaaatgacaatactattcttggttctgatgaaacgatcaaactggatggtaacgtcactatcagcgttcagtatttataagaacttgtaatacagtttttatttttacgcattaaccagttagctataactcggacagattatgccctatgacatggtctgtcttaatcaatctcatcgcaaacagtgcataacatatattaacaatatgtttctgcgttatttatcattattacaggagttttaatttaaatgctcagacacattacattcactgtatttataacaacatcaatgaatactaacaatgccggacaggagtactatcaggcattcgttttatacgatcggttaatgtttcaggaaagctcttcgcatatcttggggaaagtaaatgtaatacgctgttcttaattgttcagtgctcaccccccagagtatagctcattccattattcaacttagctccatataaagggacagataatggaaagcctcagtgaaggaaccacagcaggctaccagcaaatccacgacggtattattcatctggtcgatagcgcccggacggaaacggtacgtagcgttaacgcgttaatgaccgcgacgtaccaggaaattggccgacgaattgtcgaatttgaacaaggtggcgaggccagggctgcgtatggtgcgcagctaatcaagcgactaagtaaggatttatgtctaaggtataagcgtgggttctctgcaaaaaacttacgccaaatgaggcttttttacctcttttttcaacatgttgaaattcaccagacaatgtctggcgaattaacaccattgggaattccgcagacaccgtctgcagaattcccaagcgcaaagatttggcagacgctgtctgccaaatctttccccttgcccaggtccacctacgtccgtttactttccgttaaaaacgctgacgcccgcagcttttatgaaaaagagacgctccgctgtggctggtctgttcgccagctagagcggcaaattgcgacccagttttatgagcggacactactgagtcatgacaaaagtgccatgctgcaacaacacgctcctgccgagacgcatattcttccgcaacaggcgatacgcgatccctttgtgctcgaatttctggaattgaaagatgaatatagtgaatccgattttgaggaggcgctgatcaaccacctgatggatttcatgctggaacttggggatgattttgcctttgttggtcggcagcgaaggttacgcattgatgacaactggtttcgtgtcgatctgctgtttttccaccgccgtttacgctgcctgctaatcgtcgatctaaaagtgggcaaattcagctatagcgatgccggacagatgaatatgtatctcaactacgccaaagagcactggacgctaccggatgaaaatccgcccatcggtctggttctctgtgcagagaaaggagccggagaagcgcattatgctctggcaggtttgcctaacaccgttctggcaagcgaatataagatgcaactacctgatgagaaacgactcgcagatgaactcgttcgaacacaggcggtgctagaggaaggctatagacgccgttaatttcagcggtttcgaattctgcagacagtgtctgcagaatctttaaaacgaactaagttttaagccattaaatcagccttaaccttcaccacaacctttttaatctctccaggctcgccgacaacgcatcctggtttatgcggttcacctggcataaacacggcgaacattcccggttttaagatgatggcttgctcgttatcaatggtgctgcaaagctgataatcatcctcatggtggaactcttcacactgacgcgcagtgcctgccatgccaaacagaatccgttcctcaccgtttaataacagctggatatcaatgtattgctcgtgcaattccgcttttttctcgacggggctttgagtgttaaacgtcatgacattcataaagatattgtcgccctgtaattcgtaacgacccggcgctttttcttgcggtctggcagctaatgccagcgttaacgcgtcctgtaacgcaggatgtaacccagcagacggtaaactctgtacttcacccatcatcataatttttctccctgggccaacagcgtagccccaagtaaacctgcatcatggcggtaatgcgccgccagtaaatcaacatgaaatgccgctggctcctgcgccagatacgtttccaccagcgccagatacccttctgccagaccaacgctgccaccgaccaccacgcactggcaatcagttgtggctttaatatcagcgatcagccttgcaagcgtacgtgcggagcggtgaatcagctgctgcgcctgctcgtcaccctgcccggcgcgcgtgaaaatagttttcgcatccgcgccagccaactccccctgcgctgccgctgcaatgccgcgaccagaagcaatcgcttccacgcaacctgtgcgtccacagccgcagactgggccgtgtggatcggcaagcgtatgcccgatatgccccgccagaccgccagggccggtaagcagtttgcagccgctcactacaccgccgccaacgccggtggaaacggtgataaagaccatatcggttatatcgccatccagcgcctgaaactccgcccatgctgcggcctgcgcgtcgttaatggcaatggtcggcaaattggtaagttgttccagcgttttgactaacggaaagtgtagcaatccaccaagattatgcggattaagtgccagcaagctgccgtcacggattatcccggtgctagcgatggcaacccgctgcgcatgagcttgcaacggagagactaatgcggataaggcatcacgcaaggcttctggtgtctggctggctggcgtaggaagttcacgacgatcgcggatctgcccgtcagcgccaatcagcgcggcggcaagtttagtaccgccgatatcaatcgccagtgtggtcatagcaccgcctttttcatcgctgtgttgtaccactgacaaatgtgctcaagacgcgtgattgcagaaccgaccgtcaccgcccacgcgccgtggcgcatcgcatccgccgcctgagcaggcgtgttgtaacgcccttcggcaatcacccgacatccggcgtcgctcaacgttttcaccagcgccagatccggctcttctggcgtttcaggcgtggtatagccagaaagcgtagtgccaataatttcggctcccagcttttggcatgccaggccgtcttccggcgtactgcagtcggtcatcgccagtaaaccgtgatggtgaatacgtgccagcagcgtttcaacaggcaccggacgcgggcggtcggtgccgtcaatggcgataatgtccgcgcccgcctgcgccagcgcatcaacatcttcaatataggccgtgatgcgtaccggagaatcctccagatcgcgtttcacaattccaataatcggcacgctcaccaccgcacgcgtggcttgcagatttgccacaccttcaatgcgaatggcaaccgcgcccgcctgttctgccgctaatgccatggcggcgacgatttcgggtttatcgagcgggctgtccggaaccggctggcaggagacaatcaggccaccgttagcagcgattttttgatccagttgtgcaagtaagctcatacatcttcccttagcgaaaggcccggtacatagaccgggcaacaggattaacttttggttttgactaaatcgtttttggcgctgccaaacggcacggcaccgctgaatggtttaccgtcgatagcgtcatgagtacgcaacgcttccgggcgcaaccaacgctgaacgcgagaaggcatatccagcccaatcagcaggatcaccacgaacgtcagactgaagctgaggcttgccagcgcagtacccagatccagacgttgagcgatcaacgcgccgatgattggggccagtgcaccgcccaatgcgccaacgttgtaggtaaagcccaggcccgctgcacgctggtcggtatcgaaataaccgccaatcagttttggtaagatcccggcgatcccttgtccaagcatttgctggaagaacagtaacagaccgagcacccagacgtttgcgccgccaatcgcaaataccggaataatcagcagctggctggccagcaggctacaaacgtacgctttgcgggttcccagccagtcaccgaggaagccacctacgcagcatcccaccgccgcgccaaagccactaaagaacagcacattggctacagtatgcgggttataagccagatcggttttcagatacgttggcagcagcgcctgaatcggccaactgtagaggaaagcaaacaacacgaccaccatcagcattacgcccgttggccagcgtttgcctgcactctgcaccataaagctgataaagattgcggcgcataacagcccaagaacagcgacgatcgcggcattttgcaggttaccggcgaagcagaaccacagcgcagtagccgccgccagtgtcattacgatattggcaatgcgatgttcaccacggtagagaatatccaccattgtgcgtactggtgctttacctgcgtgtttctctttccagtcttccgcttccgggatgtttttacgcagccagagagcaaagatgattggcaaaatgccgataaagaacagcgcacgccagccccagaccggaaccaccaggctatagacctgagcggcaacgacggcccccacagagaagccactaatcaaaaaaccactggctttgttacgcagatgttttggccagctttcaatgacataggtggcgctggaaccgtattcacccgccatccccatgccgatgaccagacgagcgataaacatggtgatgtagcctggcgcaaagccgcaggccagcgtcccggcgctgaagagaacgatgctggtgaccattgccagacgacgcccgtagcggtcacccatagcgccgagcatcaggccgccgaaccagcgagagataaaggctgcagagatcagacttgccgcctgcaccgtcgtcagcccgaattcaccttgtacttcggtgagtaccagggcgattaaaacgaaatcaaaaccgtcaagcagatatcccaaccaggcagcggaaaatgcgcgccattgtgcacggttgagatggcgataccacgggatattctgggttgtagtactcattgtgagtctcccgcggtgggcgatgcccacacgctttggtatgaaaattgtagggtacagatgcgtttatttcccctcacccggtaggggcgagcgaggggaaacaactcacccgcgctcttgcatcaactgctgggccagcgccttcagttctggcagatatttttcatctaccggtccaaacggtttgcggcacagcggcacagaaacgacatccatataatggaggacagttttcaggccgcggaatacgcccgttttgatcagtaaatcaatgactttattgcattcagtttgcagtttctgcgcggtctggatatcgccttctttcagcgccttaacgatcccctgatagcgccagcccatgatgttgtaggtactgccgataccaccatcagcgcccgccagcagaccagaggcgaagatttcgtcgtaaccgttatagagcacaagatcaggatgttcacgacggatctgctccatctgatagagatcgccagaggtctgtttcagcgcacctacgccaggcaatgtaacaagtgtgttgatctgatccagggtcagttttaccccactcagggctggaatgttgtacaccaccatcggcaaaccatccgcgctatcaataattgcccgatagtgatcgcagtgttcttcaaagctgaaaggatagtagaacggcgtgacggcggagacggcatcgaagccataacgtttagcgcttgccgcaagttgttggctttcggcggtgctgacgcaaccgacgtgggcgatgagtttaatcttacctttcgcctcttcggcgacgatttccagtacctgttcacgctcggaaaggctttgtacaaaggcctcgccggtgctaccacccacgtataaaccgtcgatgccctgctgaatattgaactgaaccaggcgacgcagactcgctttatccagtgcttgttgttggtcaaaaggagtcaggagtgcagccattacgccacgtaaattcgttgccataaatacctctgaagtgatgcttgtctgataaacgatatacctttatacctgttataccagatcaattaagcaacaccccatacagaaagcttataatgcgatctgcttcactaaagtggcattatttctttttgttggtggtctgaccgaaagcgtgccaggtagcagagacgctgttgagatggctttgcaacgcacgatcggcttcgtcaggatcatgacggcggatcgcatcaacgatcgcaatatgctgttgataactaacgttgttatgttcgtgcagtgcctgatcggtaaccgttgggcgtgcggcaataagccagtcgagcagggcaacgtggatcgccatgaagattgggttaccggggatctccgccagcacgcggtggaaatcaacgtcactacgaatgaatgccgcgttgttatccaggctctgactgttgatttccagtgcttttgccagcaaatcgatttgctcatcggtggcatgttcagccgcatagcgcaccagactggattcaaagaacagacgtaattgttcgaaatgggcaatcccaccgggatgagaaaggaaatctttcgccatgccggaaagctcaccgatgatagtgtccgcagaaggacggctgacgcgagcgcgttcgccgttgtttatttgcaccagacctttgcgttttaacgctgccagcgcttcacgcacgctaggacgcccgacgttaaagaacgccatcagttcgcgttcagacggtaattgttcaccttcgccaaattcacgacggcggatcatctgttccagctcttcttccaccatttcggagagttttttacgcgccagcgggcggctacgcaagttgcgaccaattgcaggactagaatcttcggtttggctatcaaatgcgttcataaggcccattctgtaaggtcagtgtgattaacatcatcagtgacatcctatcacaggattgaaagtaggggaaaatggcagggttttctctttgtgcctcatcattaccataattaacggaataattaactattgcgaaaaattaatgtaacgcagataaaaacatcccgtttgaattatttataagactattcacgagcattatgaatattatgaatgtgttcttacaaaataatcataagcgcatattttttaatgaaaaatcacctcacctacaattaaaaacacgacatccgcaccataaatagccttgcaaaaaatataacatcgttgttttcaatctgccgtttatgggattgaccgttttcttttgacacggagttcaacaatgttcggcataattatatctgtcatcgtattaattacgatgggctatttgatcctgaaaaactacaaacctcaggtggtgctggctgccgcaggtatcttcctgatgatgtgcggtgtctggttagggttcggtggtgtactcgatcccaccaaaagcagcggctacttgatcgtcgatatttataatgaaatcctgcgcatgctgtccaaccgcattgccggattggggctgagcattatggcggtgggcggttatgcccgctacatggagcgcataggggccagtcgcgcgatggtgagcttgttaagccgcccgttaaaactcattcgcagcccgtatattattctgagcgcaacttacgtcatcggccaaatcatggcgcagtttattaccagcgcctccggtctgggtatgttgctgatggtcaccttatttccgacgctggtgagtctgggagtaagtcgtctctctgcggtggcagttatcgcaaccacgatgtccattgagtgggggattctggaaacgaactccatttttgctgcccaggtagcgggaatgaaaattgccacatacttcttccactaccagcttccggtcgcctcttgcgtcattatcagcgtggcgatctcccactttttcgtgcaacgcgcttttgacaaaaaagataaaaatatcaatcacgaacaggcagagcaaaaagctctcgataatgtcccgccgctctattacgccattttacctgtgatgccgttaatcctgatgctcggcagcctgttcctcgcccacgtcgggctgatgcagagtgaactgcatctggtggtggtgatgttactgagtttgactgtgacgatgtttgttgagttcttccgcaagcataacttgcgcgaaacaatggacgatgtgcaggcgttttttgacggcatgggtacgcagtttgccaacgtggtaacgctggtggtcgcgggtgaaatatttgcgaaaggcttaacgacgattggcactgtcgatgcggttatcaggggggcggagcattctggtctgggcggtattggcgtgatgattattatggcgctggtcattgccatttgtgccattgtgatgggctctggcaatgcgccgtttatgagttttgccagtcttattccgaatatcgcagccggactacatgtaccagcggttgtaatgattatgccgatgcattttgccacgacgctagcgcgcgcggttagcccgattactgcggtggtggtcgttacgagtggaattgcaggcgttagcccttttgcggtggtgaagcggacagcgatccccatggcagtcggtttcgtggtgaatatgattgccacaatcacgctattttattaagtcattaaaaagacaaaacaggccgcctgggcctgttttgtattacttcacaacgcgtaatgccggtcgaccaccgcgtggtggctgcggaggttcatcgtcaggatgagtgtcatcatcgtgatctggcttgtcgccatcaataacgctcataacggtttcgttgtctgcgcttgcctcttcatcattcatgatgctggtatcttcatcgtaggcagcttcaggctcaaacatcgtgcctgcgccattttcacgggcgtagatagccagcacggcagccagcggcacagaaacctgacgcggaatgccaccaaagcgcgcgttaaagcgcacctcatcattcgccagttccagattgccgacagcacgcggcgcaatgttgagtacgatttgcccgtcacgcgcatattccataggaacctgcacgccagggagcgtcacatccaccaccaggtgcggcgtgagctggttatccagcaaccactcatagaatgcacgcagcagatagggacgacgtggtgttagctgactcaaatccatacagattaactccggcccagacgcatttcacgttctgcttcagttaaagaagcaaggaaagagtcacgctcaaagacgcgggtcatatagcctttcagctctttcgcacccgggccgctgaactcgatgcccagttgcggcagacgccacagcagcggagcaagatagcaatcgaccaggctgaactcatcgctcaggaagtacggcttctgaccgaagaccggcgcaatcgccagcagttcttcgcgcagttgcttacgtgcggcatctgcttcagaagcactaccgttgatgatggtgttcatcagcgtgtaccagtctttttcgatgcgatgcatgtacagacggctttcaccgcgagctaccgggtaaacaggcatcagtggcggatgcgggaaacgctcatccagatattccataatgatgcgagattcccacagggtcagctcacgatccaccagggtcggaacgctctgattcgggttgaggtcaatcagatcctgaggcggattgtccttttccacgtgttcgatctcgaaacttacacctttctcagccagcacaatgcggacctgatggctatagatgtcagtaggaccggaaaacagcgtcattacgctacgtttgttggcagcgacagccatgaaaacctccaggtatagtcagaatttttactgctaccagccaccaggtggccagtcagaagttgtgttacccaataaggaacgactctctttgttcgaaaatcaaacaaaaaatgagcaatacccgacatttgggcagaaaattggatgatagtttaccagattttgcgaccattgtggtgagtcgatgccggaaatggggaaaaagagatgcgctttagtctgaaatagttgacttagtcccttattggcgatgtggtttttgttttacctgtctgtcaggtggcagcaaaaagcaactttccagtttttacgctgattcagattttagctataaaaaaacccgccgaagcgggttttttcgaaaattgttttctgccggagcagaagccaattaacgtttggagaactgcggacgacgacgtgctttacgcagaccgactttcttacgttcaacctgacgagcgtcacgagtaacgaagccagctttacgcagttcagaacgcagggactcgtcgtattccatcagagcgcgggtgataccgtgacggatcgcaccagcctgaccagagataccaccacctttaacggtgatgtacaggtccagtttctcaaccatgtcgaccagttccagcggctgacgaactaccatgcgggcagtttcacgaccgaagtactgttccagagaacgttggttgattacgattttaccgttgcccggtttgatgaaaacgcgagctgcggaacttttgcggcgaccagtgccgtagtattgattttcagccattgcctataatcccgattagatgtcaagaacttgcggttgctgtgccgcgtggttgtgctcgttacccgcgtaaactttcagtttacggaacatagcacgacccagcgggccttttggcaacatgcctttaaccgcgatttcaatcacacgctcaggacggcgagcaatcatctcttcaaaggtcgcttgtttgataccaccgatgtggccggtgtggtgatagtacactttgtcagtacgcttgttgccggttacagcaactttgtcagcgttcagaacgatgatgtaatcaccggtatctacgtgcggagtgtattccgctttgtgcttaccgcgcaggcgacgagccagttcagtagccagacggcccagagttttaccggtcgcgtcaacaacataccagtcgcgttttacggtttctggtttagctgtaaaagttttcattaaaagcttacccaataaatagttacacgttggtgaacacccaaacgtcttcaattgttgaggttcacacgacaaagtccggcaaacctaccccttcgaatagcctatgccagcacacaaaaagttttgggaaaaaaactttcttgtaacgtggggtcgcaggattatagagaagtcggggtcaaagatcgacccctttttgtgatttgtgacaggttttaacccgccaaatgctcgcgcttcagatactcttcgctttgcatctcttgcagacgactcaggcaacgctggaactcaaacttcagccgatcgccctgataaatttcatacagcggcacttctgcactcaccactaatttgacatggcgctcgtaaaactcatccaccagcgcaataaagcgccgcgcttcgctctccatcaaccgcgtcataactggtacatcaaacaacatgaccgtatgaaagagacgactgagcgcaatatagtcatgctgactgcgggcgtcgacgcacagcgtagtaaaagagaccgccagcgtctggttctcgacgcccattgttgctaatggccgatggttgatttctaacgtcggactattttctcgtttcccccccgccagcgccaaccatagtttatccatttgcgcccgggtttcatcgtgaagtgggctaagccacagatgcgcctgagtgagtgtacgcagacgataatcaacaccagcgtccacgttcattacatcacaatgctgtttaatggcatcgattgcaggcagaaaacgcgcacgttgcaggccatttcgataaagttcatccggcggaatattactcgtcgctaccagggtaataccgcgagcgaacagggctttcatcagaccgccaagtagcatggcatcggtaatatcagaaacaaaaaattcgtcaaaacagagcacgtcagtttcggctttaaagcgatcggcaataatttccagcggatcggtctgcccctgtaaggcagttagctcttcatgcacccgcagcataaaacggtgaaagtgcaggcgctgtttccgctctcccggcaggctttgatagaaaaggtccatcagccaggttttcccgcgtcctacaccgccccacatatataagccacgcactggcgtatgctttgtgtcttcgcgtttaccccacagcttaccgacccgcgccattagcccactcgtcctgggggctggtggcgtgctattgatgagttcctgataaataatttccaggcggctgacggcctctttttgaacgtcgtcgggttgatggctgccttcattaagcgccttcaggtattggcttgttggggtaacgctttgcatgatcttattgttattccttgaataatcggtgcgccgttgttcacggttgacgaaaaaaaggccgttctacactacgcgatatgcagtcgggattccacttctgtggaattaacggttatagtggcataatcagccgcaggcatggagcctgaagccaacaccctacggaaacaaaagacaacgggagatgttcatgacctgggaatatgcgctaattgggttagtcgtcggcatcattattggtgctgtggccatgcgttttggtaatcgtaaactacgccagcaacaggcgttgcagtacgaactggaaaagaataaagctgaactggacgagtatcgcgaagagctggttagccactttgcccgcagcgcggaattactggataccatggcgcacgactatcgccagctgtatcagcacatggcaaaaagctccagcagcctgctgccggaactgtctgctgaagcaaacccgttccgtaatcgtctggcagagtctgaagccagcaacgatcaggcaccggtgcagatgcctcgcgactattctgaaggcgcatccggcctgctgcgtactggcgcgaagcgcgactaatttatttttcgggcgcagccattgcgccctcctcttctctccctccccgactatcatttaatctggtgtctcattgttagccgtctgaaaattcaataacatcaaactgttttgaatctcttttcttatcattcaggtacgagagcaggaataatgaaaaaacaaacccagctgttgagtgcattagcgttaagtgtcgggttaactctcagcgcgagttttcaggccgtcgcgagcattccaggccaggttgccgatcaggcccctctccccagtctggctccaatgctggaaaaagtgcttccggcagtggtgagcgtacgggtggaaggaacggccagtcagggacagaaaatcccggaagaattcaaaaagttttttggtgatgatttaccggatcaacctgcacaacccttcgaaggtttaggctccggtgtcatcatcaacgccagtaaaggctatgtgctgaccaacaaccatgtgattaatcaggcacagaaaatcagtattcagctcaatgatgggcgcgagtttgatgcaaaactgattggtagcgatgaccagagcgatatcgccctgttacaaattcaaaacccgagcaaattaacgcaaatcgctattgccgactccgataaattgcgcgtcggtgattttgccgtagcggtcggtaacccatttggccttgggcaaaccgccacctctggcattgtttccgcattaggccgcagcgggttgaatcttgaaggtctggaaaactttatccagacagatgcttccattaaccgcggtaactccggcggtgcactattaaaccttaacggtgagttaattggcatcaacactgcaatccttgcgcctggcggcgggagcgtcgggattggatttgccatccccagtaatatggcgcgaacactggcgcagcagcttatcgactttggtgaaatcaaacgcggtttgttaggcatcaaaggcaccgagatgagtgccgatatcgccaaagccttcaaccttgacgtgcagcgtggcgcgtttgtcagcgaagtgttgccaggttctggcagcgcaaaagcgggcgtcaaagcgggcgatattattaccagcctcaacggcaaaccgctgaatagctttgctgagttgcgctctcgtatcgcgaccaccgagccgggcacgaaagtgaagcttggcctgctgcgtaacggcaaaccactggaagtagaagtgacgctcgataccagcacctctagcagcgccagcgctgaaatgatcacgccagcgctggaaggtgcaacgttgagcgatggtcagctaaaagatggcggcaaaggtattaaaatcgatgaagttgtcaaaggaagcccagctgctcaggctggcttgcaaaaagacgatgtgatcattggcgtcaaccgcgatcgggtgaacagcattgctgaaatgcgtaaagtgctggcggcaaaaccggccatcatcgccctgcaaattgtacgcggcaatgaaagcatctatctgctgatgcgttaatgtcgtaaaccgggcatcaggcttacgtgtgatgtccggttaactcgtggtatgctgctgccgttcccttttttaatgacgcctccatcatgtttgtgaagctcttacgttccgttgcgattggattaattgtcggcgctattctgctggttgccatgcctagcctgcgcagccttaacccgctttccactccgcaatttgacagtaccgatgagacgcctgccagctataatctggcggttcgccgcgccgcgccagcggtggttaacgtttacaaccgtggtttgaacaccaactctcacaaccagcttgagatccgcaccctgggatccggtgtaatcatggatcaacgcggttatatcatcaccaataaacacgtcatcaacgacgccgatcagatcatcgtcgccttacaggatggacgtgtatttgaagcattgctggtgggatctgactctctaaccgatctggcggtacttaaaattaatgccactggcggtttacctaccattccaattaatgcacgtcgcgtaccgcacattggcgacgtagtactggcgatcggtaacccgtacaacctcgggcagaccattacccaggggattattagtgccacgggtcgaatcggtctgaacccgaccgggcggcaaaacttcctccaaaccgatgcttccattaaccacggtaactctggcggcgcgctggtgaacagcctgggcgaactgatgggcattaatacgctgagctttgataagagtaacgatggcgaaacgccggaaggtatcggctttgcgattcctttccagttagcaaccaaaattatggataagctgatccgcgatggtcgcgtgatccgcggctacattggtatcggcggacgtgagatcgcaccactgcacgcgcagggcggtggtatagatcaactgcaagggatcgtggttaatgaagtgagtcctgacggcccggcggcgaatgcgggtattcaggtcaacgatctgattattagcgtggataacaaaccggccatctctgctctggagacgatggatcaggtggcggaaattcgccctggtagcgtgatccctgtagtagtgatgcgtgatgataagcagttaacgctgcaggtcaccattcaggaatatccggcaaccaattaagtcgtgcgctcaaaacaaaaaaccggagtctgtgctccggttttttattatccgctaatcaattacttattaacgaactcttcgcccagggcgatatctttcttcagcgtatccagcataccttccagcgcgttctgttcaaatgcgctcagggtaccgatagatttacgctcttccacgccgtttttacccagcagcagcggttgagagaagaaacgggcgtactgaccgtcgccttcaacgtaggcacattcgacaacgccttgttcgccctgcagtgcacgaaccagagacagaccaaaacgtgcagctgcctggcccatagacagggttgcagacccgccaccggccttcgcttcaaccacttcagtacccgcgttctggatgcgtttggtcagatcagccacttcctgctcggtaaaactaacgccaggaacctgactcagcagcggcagaatggtaacaccagagtgaccgccaataaccggcacttcaacttcgcctggctgtttgcctttcagttccgcaacaaaggtgttggaacgaatgatatccagcgtggtaacgccgaacagtttgtttttgtcataaacaccggcttttttcagcacttcagcagcaattgcaactgtggtgttaaccgggttagtgataataccaatgcacgctttcgggcaggttttcgcaacttgctgtaccaggtttttcacgatgccggcgttaacgttaaacaggtcggaacgatccatacccggtttacgcgctacgcctgcagagataagaacgacatctgcgccttccagcgccggagtcgcatcttcaccagaaaaacctttgattttcacagcagtagggatatggctcagatcgacagccacaccgggagtcactggagcgatatcatacagagagagttcactaccactaggcagttgggtttttaacagtagtgcaagcgcctggccaataccgccagcagcgccgaggactgcgactttcatcctaaactccttattatattgataaactaagatatgttgctccgctgccgcgaccttaatccacaaaattgccgtttacaatgaccacatctcaagaatgtgtagtcacgcaagtttagcgtttatgcatttaattgccgtaatcaggaacctaacttacgtaattaacagtcgcttatgcattagcgcaacattccaacaggtggtgacaatataccctaccgttcagccaaaacaacatcaatttgataacaattaatttacttttaagcagaatttgcatgccgtgacgcaggcatgtttctcaataacgaaatttgataaaatcccgctctttcataacattatttcagccttcttcagggctgactgtttgcataaaaattcatctgtatgcacaataatgttgtatcaaccaccatatcgggtgacttatgcgaagcagcgctaagcaagaagaactagttaaagcatttaaagcattacttaaagaagagaaatttagctcccagggcgaaatcgtcgccgcgttgcaggagcaaggctttgacaatattaatcagtctaaagtcagccggatgttgaccaagtttggtgctgtacgtacacgcaatgccaaaatggaaatggtttactgcctgccagctgaactgggtgtaccaaccacctccagtccattgaagaatctggtgctggatatcgactacaacgatgcagttgtcgtgattcataccagccctggcgcggcgcagttaattgctcgcctgctggacagtctgggcaaagcagaaggtattctgggcaccatcgctggcgatgacaccatctttaccacccctgctaacggtttcacagtcaaagacctgtacgaagcgattttagagctgttcgaccaggagctttaatctctgccccgtcgtttctgacggcggggaaaatgttgcttatccctctcaaccccctgctttcccctgcgattaatttaacgaatagtgcgttttactgcgacatgtcattcacacaatgaatacataaggtaaaaaaagcacattatgcaaaattcattatctaattgaaaaaactagaattaacgataaataaccgtatttttaattcttttttgttattaaaattcacatttttaacacttagtatcaactgaaacagttagcgcggtattaattagctcaataattagtgtatacttgattttgtgatatgggtcacgaaacaaaggcccagctaaaagattatgtcgaggtaaaaatcatgaaaatcaaaaccactgttgctgcattaagcgtactttctgttctctctttcggtgcattcgctgccgactccattgatgctgcacaagcacaaaatcgtgaagcaatcgggaccgtatccgtaagtggtgtggcgtctagcccaatggatatgcgtgaaatgctgaacaaaaaagcggaagagaaaggcgcaacggcctaccagattactgaagctcgtagcggtgacacctggcacgctacggctgaactgtacaaataaaccctcatcgtcttgtccgacgatattgcccccggttcgggggcttttttttgcgttaatgacgaacattaaaacgcaaatgcccttccagctcttcctctgcctcatcaaacagcaatattaacgcgccaaaacggcgacgcgttttctctcccagatgaacaaattcaatctcaagtggtagcggcaggacatcgttcattaacacatcccatagactgtcgagatcgcgtaccttatctttcgccagaccaaaggtttggctaaagtcacgataaaaatcctcctgactctcaatctcatcaaaatcaaaggtataaatattcatctgttgccaccgtcacgtttcgcggcgagttctgccgtgcatcgctaagtatagccatgaaaaaaccgacgcttttggcgtcggttttgacttaactatcggtcaacgcatgttgatacttatggagcatccccgccagccgatttaccggttccgtcacctgcggtggcgcttgccagatgcgtagcttttcctggtagatttccagttcttccagcaactggccaaagtaccgacgacgtttatcatcgctacgggcagatatcacatggtctgctgtgcggcgcatttgtcggtgaaacgcgcttaaatcctcgttaaccgggatcggtgcatcacgcaggcgctggtgcgcgataatcatcgtcagcgccaggcgaaatttcggcaaatcccctgggaacttattcatcagcaaaaacagctgctgataaagtgccgggaggtggttctctttacgacgtgccacattggtagtcatcgcggaaacagcggcagaaacaaactgattaagcagtacacgtccggtcctgtcgcggcttttatcccgcaccagcaaaataacggtgaacgcgagcacacagccgacgatttgccctaatgcgctgtcgagaaactgactgaaatggaaagtcatcgggttatccagcacgataatatttatggtgctggccagtgcccccatgctgcccagtcgccgtttctgtacttctataccgaggaagaatcccagcactgccaggctaatgcacagcagcaacatgctctgttgggtattagggataatcaccaaaaagtagagcagccctaacggcagcgcggccagcgtcccgtagataaagtcgatcgccaccatgcgtggattcggcaaacgcattgccagactcgtcactaccgcaatcatcaccattgcaccactgccggaagtccagcccgtccacagccagaaaagcgtgcccagaatgcaggaaagtgtggttcgccagaagttacccattgcatgatgacgttcggcactctctacttttacttccggttcgccttgcaggatctcttcttcggtggcgttgatttttgtgttactgataacgccgcgcttgagaagctgataacgcgttgccgccgcgacccagctataaatggtgacaggcgtttcccgttccccggtccaggcgataactctccgcaggcgtttgagctgcttgtggacgtcctgcgcggtttctaccggcgtgtcaaaaaattcgcggaaagtatcagtgatcaattccgggcgcgtattctgaataagataagtttcgcaggattgggtaatcagcgtcaggcttagcgtattgatcgcttttaaacgtcgattggcccgcgcccagcgggaagattccatattcaggttgctgcgcatgccttgtagcgccgtggtgcgtcgcaccaggtcgccccaggctttatcgacaacttcaccatcgccatgcttgatacagagttgcattaattgatattgcgcgaccagcaaactttccagctctcgatccacttcttgtttgatgcttcgcggagaaaagagcaaatccgccataatcgcacacacaataccgataacgatctcgctacaacgttcgacggcaaactgcggcgtaagcaatggttccggctgaatggtgatcacaatgatcagcgcggtataaccggccagcccccacgcatagctgttttctattcgtaccaggctggatatccaggtacaaaaaccggcccagatacagcacaccagaatcatcaataatggtgcgcggatcatcgcaatgatgatcaccagtccggcaatacagccaataaatgtgccgatgatgcgcaaaaagccacgatagcgaatagcgccagaatacggttcacctcccgcagcaaaggccgtaccggcggcaacaatcgccgctgtcagtaccgcccagcgtggcgtttccagctggaagtgaaagccaacaaacagcgccagtacaatggcggtcgccagttttaccgcaaagcgaatatgttggttagcaatggagaaaatacccatcgtgattaaccaaactcacgcaggcgatgggccattttacggaagaagctatcctggctttcgtcgcgatcttgtttgccagtgaccaccactgtagcagtggtgcccgcaggccagatgttctcttgctggttgtcgagacgaatacgaaccggaacacgttgcgcaagacgcacccattcaaggttagagtctatagtcgccatccctttgtcgtcacgcgtgctgctggcgttggtgacccctgcggcaacactatcaacagtccctttcagcactttgttactgccaagcggcgtgatctctgcacgataccccggacgcaccccttccagcttagtttcttccatataggccagtacatagaaggagttctgtttcaccagcgcaaccgccgtacttcctcgagtaataaactcaccggtatagacgttgaggttggtcacccagccatctgctggcgcgcggatcaccgtgcgttcaagatccagttttgccagatcgcgggtcgcctgcgctttcgctaactgatgcagaaccgtttgtagtacgttgttggcctggtcgatctcttcgcgagacatcgcctgcacaccgagacggttacgacgtccggcctcctggcgtttctcctgtgccagtacctgataataagcaacatcggcttgcgcttcctcaagcgccttttgatagcgcggctggtcgatggtgaacagtatctgtccttttttcaccagctggttatcatgaacattcacctgggtaatgagtccagaaacgtccggcgcgatcgcaacgacgtcagcgctaaagcgcgcgtcacgcgtccagggggattcggtgtaatagacccaggcattaaaaattgcgatgaaggccagaatgactaatacgaccgtgatggccgtacgggagaattttcttattagtgttttcacttcaacctcaaacgaacagtcggcttatcaaataaaacaagcagcaatagagcgcggtgttgaacaacgccggatgccagacaaagtcgtagatacctgttggcacaagtacccggcgcaccagccagaaaatcgccagacttaaaagcaattcaaaaaatatcggtgggaaggacagcccaaacaccacgataacgggaaacagactcatgttgaccttggttgtaaagagagagcaggcgttattattttcagcatctgtcgccgcagagaagggcatggaaagccgggcgagagcaacattgctgtagattgatatttaatatattagcgtaactgttatgctgttatctatattatgtgatctaaatcacttttaagtcagagtgaataatggaacgactaaaacgcatgagcgtgtttgccaaagtagttgaatttggctcttttaccgccgccgccagacagctacagatgagcgttagctccatcagtcagacggtaagtaaactggaagatgagttgcaggtaaagctgttaaaccgtagcacacgcagcattggcctgaccgaagccggtagaatttactaccagggctgccgtcgtatgcttcatgaagtgcaggatgttcatgagcaactgtatgccttcaataacacccccatcgggacgctacgcattggctgttctagtactatggcacaaaatgttctcgccgggctgacagccaaaatgctgaaagaatacccaggtttgagcgtcaatctggttaccggaattccagcccccgacctgattgccgacggtctggatgtggtgatccgcgtcggcgcgttgcaggattccagcctgttttcccgccgtctgggcgcgatgccaatggtggtgtgcgccgcgaaaagctatctcacacaatacggcataccggaaaaacccgccgatttgagtagtcatagttggcttgaatacagcgtgcggcccgacaatgaatttgaactgatcgcaccggaagggatcagcactcgcctgatcccacaaggaagatttgtgactaatgatccgatgacgctggtgcgctggctgacggcgggtgccgggatcgcctacgtgccgctgatgtgggtgatcaacgagatcaatcgtggggagctggagatcctgctgccgcgttaccagagtgatccacgcccggtttatgcgttatataccgaaaaagataagctgccgctgaaggtacaggtcgtgatcaacagcctgacggattattttgttgaggtcggtaaattgtttcaggagatgcacgggcgcgggaaagagaagtaattcatattgtactgttacgttgtacaaacctgtgccaacgggttcccctcaccctaaccctcaccccaaaggggcgaggggaccgttcgtgcacgtagaaagattaattatccttctgaaaatagtgaaattattacgcagtaccgccaacagtcaggttatcgactttcaacgttggctggcccacgccaaccggcaaactttgcccttctttaccgcagacacccacgccgttatccagtttcaggtcgttgccaaccatgctaatctgctgcatggtttcgataccggaaccaatcaacgttgcgcctttcaccggcttcgttactttaccgttttcaatcagatatgcttcactagtggagaaaacgaatttgccggaggtgatatccacctgaccgccaccaaagttcggtgcatagataccgtactcaacggattcaataatttcctgcggggtgcttttacccggcagcatataggtgttggtcatacgcggcatgggcagatgggcgtaggattcacggcgaccgttgccagtcggcgtcatccccatcaaacgcgcgttgagtttatcctgcatgtagcctttcagaatgccgttctcaatcagcacgttgtactggcctggcgtaccttcgtcatcaatcgccacgctacctcggcgatcgaccatcgtgccatcatcaaccacggtacacagttcactagccaccagctccccgacctgtccactaaatacactagtgccacggcggttgaagtcgccttccagaccgtgaccaaccgcttcatgcaacagcacgcccggccaacctgcgccaagtactaccggcatggtgcccgctggtgcagcaacggcagaaagattgaccagcgccatacgcactgcttcttttgcccatgcatccgcacggacttcgccgtcgagatcggcaaggaagaattcataaccaaaacgaccgccgccgccactggcaccgcgttcgcgtttgccatcttcttcgacgagaacgctcacggaaagacgcaccagcggacggacatccgccgctagcgtgccgtcggtggccgcaaccaaaattaattcatagacaccactgaggctggcagtcacttcctgtacgcgcttgtccgcttcgcgggcaaccttatcgacgcgacgcaggatatccagcttctcttcacggctcatgctttgcagcggatctacgctggtatacaacgggctatgctctaccgcgcccagcgtctgtactttaccatcaccactatcacggacgatggtgcgcgccgcttgcgcactctgttccagcgccagcaggctgatttggtcagcgtaagcaaatccggttttttcaccgctgattgcacgcacaccaacgccctgatcgatgttgtaagaaccatctttaataatgcggtcttctaaaacccaggattcgtgatagctgctctgaaaatagagatcgccataatcaaggcgacgttcggccagttgaccgaggatcgcgaacaagtcctgatgtttcaggccgttcgccgctagcaattgttcacttaccaggttaagactcatcgtttttgctactcgttagttactgcagtagaggattttttacggctgccggatgcggcgtgaacgccctatccagcctacggttatgttccggtttgtaggcctgataagacgcacagcgtcgcatcaggcaacggctgtcggatgcggcgtaaacgccttatccgacctacggttatgttccgtttgtaggcctgataagacgcacagcgtcgcatcaggcaacggctgccggatgcggcgtaaacgccttatccgacctacggttatgttccgtttgtaggcctgataagacgcacagcgtcgcatcaggcaacggctgccggatgcggcgtgaacgccctatccgacctacggttatgttctggctcgttggcctttggcaacgattatcctatgagattggggcaattacgcgccctcgtcaaatcattgcgctttttctttacgcggttggcgcaacacttcgttgatttgcggatcgtccagcggaccgctaatgtgatagcgcaaaatggagactttgctccacagcggccccagcactttactggcggcaaacactgccgcgccaacaatggggttaaccgcaaaagccgcagccacgcccaccgtcgcagaaatctctggtgcgacaaccgcttccatattcaggtcgcgacgtaccagatttacgctccctttcatggcgatatccgcctccaggccatccaccagcgtgtcgtcggtgtgcataacgccgtctttaatccacgcggtgctgcgaatggagtcaaaatagaacccttcgccaaaagtgtctctgaaatcaaaacgcagcttacgcatcagggcatctacgctcaataagcgcagcaattgcccggcatgtccggtattgatttcggtaatttcgcctttacccagttgagtatgaatgatgccattcaacgtcgcttcatctggctgccagggtgctttgcgccagtgtaaatcgtaatccacattaaaactgctctggcgtatgggcgtcgtgacaccaaaaaattctgcggcggcatcaattttctgcccgcgcagttttcctttcaggctggtacgttcattccccggattattaacccattcaccatcggcagtaagccggctgaaaccagtatcaatcagtccattggtcagcgttaacgtatcgccagaaatggtgatatcactgtcaatgcgaccgaatttttgcccccagaaccagcactctgtgcatcgtatttgggcgtccggccagccacggaagttaatgcgctccgttgtcgggaaaggactactcggcgtactatcaccacgagttttcgccacgctcgggttgtaataaagatatttgatattcgccagccacggcgcgttattacgcatcgctagcgtggcgttgatttcacgcccttgcgcttcaaccagggtgccatttgccgtcggttggctaacaatactcaggttattccattgctgatttcccagactcaacataggcgtacgtaacgttatgtgttgtgggaaactcgctgcaccaccgacactctccgcagcgcctttctggaacagggccagccactcggcaccattcatcggcggcatattgagttcaacgccactttgttccggcaacggcgggagcgttttactgtctgccgcccaaatagcacgatcgagcgtcagcttttgaccgagcaaccagcggctattgaaatgattatccgcaccagcctgtccggttaattcaaagctgttgagattgccatcaaccttaacgtttaccgctagtggttcacccgcaggtttggctaacggactaggtaagtgactgctcacattctttagatcgccgttcagctctatgttataggtcgcaccagcatgataaggcagatcaatgcccactttaccatcccacgccacgctgccactcaatgcttcgttcaccgcttcaggcagaacgccggttttcgccggttgccagttaccgttgaggtttaccgctacctggtaggcttttgccccttctttggtggaaaaatccacgttcaacggctgattaaaccagcttgctgtcagtggttcactttgcagatcgctattgataaagctgaatttaccgctcaaatttttcagggtgctgtcgagtggtttgataaacagactgttattacgcagcgtcacttcacctttcgcggttaccagttcgccgttcagcgggatatcaagatgtaagcgagcattcacatcgccgtcgagctggagttcttgcagggtcgcacccagagaatctttcagcggtgtctcatcaaagtaagggccaacggctttacccggacctttaatgtcagcgtcaatcagcagtttttctttactgtagtcagggatcactgcggtaagattactcgcgcgcacgccgcccagattaacgccatcggttttcatccataaaccgtcgttaataaagtccagttcaatatcaaggttagttaatgcaggccagtccggctggaaggcaaacttcgcgttgcgcagcggcaccagcacttcaaactgaccttcgttgtgtttataggggaagagttgcggattgccaccataaaccagcgtcgcgttatccgcttcaccgccctgaatcgcgccacttaagtaatcaaccaggtctttacccatcaagttttccgggaaatagcgccaggcttgactaccatcatcggtactgatgccagccagaatacccagccagggttcatcgttagcaggttgcaggtaacgaaaaccgccgcgcgcatggacggctttggctttaacgtcaatattacgcccatccagctggaaacctttgttattgttcagccagcttatagttgcctggccgtcggcgatttctagtggcgcacggaataccgtttcgtaaggcatctttgcctgcttcatgctcgcggtaagcaaaccattttcaacgctgccggaaagcgtcccggagaagtgttccgcacccggtaataatttccattgcttccaggccagatcgctccagcttgcctgaaaacgggtcttgtctgccgcctgaagcgggatatccagcgccagagtgttaatcttgccgctcggttgtgtggagcgccaaacatcacccagtgcaggactaagtttcgcggccagcgggcgtatgccctccaggcctgccagctccagattactggcgcgaatccggagttcgtcactgcgtttattgtctttgccgccaacgtcctgttccggtatccaggccagcgtcaatgctccgctcggccagggtttgccgtccatcgtgatccgtgtatcgggaatagagaactgccagcccggattttcacgcgtaatatgcgcggtcagattatccacgctcagcgtatgcgtttgcttctcgcccaaccagctggcaccgccctgtttcagccagacgtcaccgccggttacatcgcctttgtcgatcgtcatccagccttcaagggagaactgtgccgtttccagcgcaatattgtcctgcatccatttaccgagccacggcttcaggtcgatgtcatccgcctggagccagacgcgaccattgcttaacaacccctcatcatcgcgcaaatccatgcgcacctgcatcacgccgtgctgtccggtaaggctggagaggcttaccaggccttccgcacggtgtcgacgtggatcgttcagccaggtgagttgtgggatcgccagctcggcgcgctgaccggatggcgtcaggaaactgacttcactgtcgcgaagatcgaaatggtcaaattgacgaagaaacagatcgctgatgtgactggcttccagactgtcatcactaccaccgctggtgataggagtgttggtgcgaaagcgcagctgccagaaagtgaggtcgcgaaactgccagcgcatatgtaacaggctctgccagacatccagcgccagagtaacgcgtttaacgctaaattcgccgccatcttttagttctgcacggatgtcgtgtgcttcaagcgtcgggccaaaattctgccagctggcactgagctgactggcttctaccggcatgccagtcgcggattctattttgttgaggatttccggacgccaggcgtcaagatgcggtaaagcaatacgcaggccgctaaccagcagggcagcgatcacaacgagcgcggctccagtaagcagtaaaatccccggcaatcgcctcacccgtcactccttgtctgctaaaaatgtgactcaaaaaccctttgccggatggcggcccagcatctgtttacatcattacgacgtcaaactgctcctggttatagagcggttcaatttgtactttaacctgtttgccaacgaaaatttccacttccgccaggctgtgactctcttcgcctttcaaggcttcagctactgccggagaagcatagaccaggaaacggtcggagtcgtaagcatggtggacacgaacaatctcgcgcatgatttcatagcataccgtttccacggttttcaccgttccgcgaccgtggcaggttgggcattcgttacacagtacgtgctcaatgctttcgcgggtgcgtttacgcgtcatctccaccagccccagcgcgctaaaaccattaacgctggttttcacccggtctttgctcaacgcctgctccaggctgtgcagcactcggcggcggtgatcttcattattcatatcgatgaaatcaataatgataatcccgcccagattacgcaaccgtaactggcgagcgatagcctgcgtcgcttcaatattggtattgaaaatggtgtcgtccagattgcgatgaccgacaaacgctccggtattgatgtccacggtggtcatcgcttcggtctggtcgataatgagataaccaccggatttcagttctactttgcgttccagcgctcgctggatttcgttttcgacatcaaagagatcgaaaatcggctggcgtcctgtgtaatgctccagcttgcttgtcatctcgggaatgtactcgctggtgaactcaagtaacgcttcgtaagtcaggcgactgtcaacgcgaatgcggtccagttcggcatcggcgaaatcacgcagaacacgctgcgccagcgccagttcgccgtacagctgataacgggtctgcgggcgttttttacgctccataactttggtccagacgcgtttcagataagcggcatcggaggccagttcagcctcgccaaccccttccgctgcggtacggatgataaacccgccctgctcgtcgcaatactctgcgaccacttttttcaggcgttcacgttcactttcgctttcaatacgttgggaaaccccaacgtgagaagcccctggcataaacaccagatagcgagaagggagcgtgatatcggtggtcaggcgcgcacctttagtgccaagcggatctttcaccacctgcaccatcagatcttgcccctgacgaaccagttcgctgatgtcgcgcaccgtgaattgcttttgttcttcacccgccacacattcggtgtgcggcatgatgtcggatgcatgaagaaacgcggctttatccagcccaatatctacaaaagccgcctgcatacccggaagtacacgacttacacgacccttgtagatattgcctactattccgcgtcgcgcctcacgttcaatatgaatttcctgcagaataccgccatcaatatacgccactcgcgtttcgctaggcgttacgtttactaacaattcagccgtcatgtttatcccttttctcacgcagtgcgttaaaattacttaataattcatacgtttcaaccagcggtaagccgactacggcgtgatagctgccatttatcttcctgacaaaacagccacccagcccctgaataccgtatgcacctgctttatctaacggttcatcgctggcgacatagcccgcgatgtcttcgtctgttaacgttctgaaagtcacatcggtgaccaccaggcaatcgagaatgtgctggctgtcggccaacgccactgctgtcatcacctgatgggtctgaccgcttaatttgcgcaacatctgcgccgcatgctctgcgtcgcgcggtttctccagcacttctccgttcaggataacgatagtatccgcacccagcaccgggagatccttcgccgtttgcgcgacacctgcccgtgctttctcgcgcgccagacgcacaacatactgctgcgcgctctcctgcggctgacgctgctcctcaatgcccgtaacaatacgttcaaaggtcacgccaagttgcgcaagtaactcctgacgacgcggagaaccggaagctaaatacagagaagtcatagaaacctttattgcactgcaaactgctgacggactttgcgcatcagcaagaaaatccacggccagagcaccccattgactacactactccagaacacttccggtctgaaagagacgttaatcactaaaaactctgcccagaaaacaataatatccaccaccaggctaagcaacatgacgaccagcgcctgctgccataatgcgaggttgcggaaaagctggtatttcagcgccaccaggtaagcaatgatgctcatcgccaatacgcgtacgccaagcgtgctgccgctgatcagatccagtatggcacccatcacaaaacctgtgcccacatttacgcgatgaggcaaggccaggatccaatacaacaagatgagtaacacccagtttggccggaaaacaatcaggttatccggccagggcatgatttgcagcaacagcgcaatgaggaaagagagccagattacccagcgtccctggctacgatagctcgccactattgccctcccggcgcacgttattgccctcccggcgcacgcgcaggcggttgagcaccactttgcggcggcgtagccctttgtggagagcgattagcagcaggctgtgtcggcgcagcaggcgcagtagctgcatttcctgtcgccggttgctgcggagtcggctgagcgatccccgttgccggttcaggtaactttggccccatcgcgtctgggctaggcaatacctgcggcatcatctgcatcagacgttcattagcaacacgatgcacctcttccggcgtcatcgggttagcgccgttacgatctgccccccacagcagcagcagataacgcaaacgttgcagccctgcagtcggacgcgcctgaatcacagtataagcgcgctgggtatcgagttttacggaagagacaaccgcgaccggatagccttccgggaaacgaccgcccagaccggaagtcaccagcacatcaccaacacgaatatccgtattcgccggcagatgctcaagctgcaaatcatccgtacaaccgttaccggctgcaattacgcggatatcgttgcgcagcacctggattggcagcgcgtgggtcgcatcacaaatcagcagcacgcgactggtcagtttagcgacggccaccacctgaccaacaacacctttgtcgctgatgaccggctggccttcataaacgccattaacgctacctttatcgataacaacttgatcgctataaggatcgttaaccgtggagataacctgagtcaccattttctgctcatcctgacgcagcggggaacccagcagctcgcgcagacgcgcgttctcctgtttgtattgtccaagcatcagcagttcactgtttttcagcaacagttcctgacgtaacgcccggttttcaagttctaattggtcacggctggccagcgtctggcttacgccatccagcaattcacgaggagcattggaaacaaagtagaaaggactgacggcggtatccatataagtacggatttgactgaacgtccccaggcggctgtcggcaataataatgccgagcgccaccagcaccgccagaataaggcgaatctgtaggctcgggccacggctaaaaattggcttcataagttatgcgtattctcgtatcagaccaggcagggtaaacagacacttcccctgcctgcatccgattactcttcgctgaacaggtcgccgccgtgcatgtcgatcatttccagcgctttgccgccaccgcgcgccacacaggtcagcgggtcttcagcaacaacgactggaatgccggtttcttccattaacaaacggtcaaggttacgcagcagtgcgccaccaccggtgagcaccatgccgcgctcggagatgtcggaagccagttccggcgggcactgttccagtgcaaccattaccgcgctcacaataccggtcagcggttcctgcagtgcttcgaggatttcattggagttcagggtaaaaccgcgtggaacaccttctgccaggttacggccacgaacttcgatttcacggacttcatcgcccggataagcgctaccgatttcgtgcttgatacgttctgcggtggcttcaccgatcagagaaccgtaattacgacgcacatagttgatgatagcttcgtcgaaacggtcaccaccaatgcgcacagaagaggagtaaaccacaccgttcaaggagataacagcaacttcagtggtaccaccaccgatatcaaccaccatagaaccggtcgcttcagaaaccggcaggccagcaccaattgcggcagccatcggttcttcaatcaggaagacttcacgggcaccagcgccctgcgcggattcacgaattgcgcggcgttcaacctgggtcgcgccaaccggcacacaaaccagaacgcgcgggcttggacgcataaagctgttgctgtgcacttgtttgatgaagtgctggagcattttttcagtcacgaagaagtcggcgataacgccgtctttcattgggcgaatggcagcaatattgcccggcgtacggcccagcatctgcttcgcgtcatgacctactgcagctacgcttttcggactaccggcacgatcctgacgaatggccaccacggaaggctcattcaatacgatgccttgtccttttacataaatgagggtattcgcagtacccaggtcaatggacaagtcattggaaaacatgccacgaaattttttcaacatactaagggataatcctgaaagctggggcggaaaagaaaatccgcttactttaccaaccacacgcagcagcgacaaggcgcaaaaatcatctgctacggtgaaaattagtgcagttcgtttcctttgttacaaatctctgcctgagtccagaaaggcttaatgcatcagcagcattcctcgcctgtttgcaaccgcgtaaggtcattcatctgcatatgtgctgcaacaatctggcgagcagacaagcacactcccatgagacgcagcgcgcattattctacgtgaaaacggattaaacggcaggttaaacgctgtatctttgactatattttttcacgttagtatcaagtggctgactggacgcgaaaaaatccccttgcccgcctgtaacaccgcgctgaatcagggtctgccactcgcttcggctacgcacgccggtggcgtaaacctgggtgctggtcccggagcaggcttccaccaggctttgaaccagcagctggttctccgttcgcttctcaatgtttctgaccagccccggatggagcttgagtaactcaacattaagttctttgatccaactggtacttaccagcgtcaaaccagcctggttgacggctacccgtacccctaaagcattcactaaacgaataacaggttgtaaacgactgatatgttgacctacatcggcctctgcaagttcaataattatgcgttttcgttgacttttttcacattgcattaacgtatcgcgcagccaacgctgaaaacgcgggcgaatcaggctctcaacggtaacctgaatcgccagattttcctctggccagtaacgcaatagtggaataagacggctgatttgcagacggtcatactcttcgcttaagccaaactgcaagaccatcggcatatgctccgcgctgctaacctcttcattaccatcgaagatgcggcacatgagttcgcgatgatgaacctgaccttcgcgagtaaccgccggtttttgataaaggcgcgggccgccgcgactgagcatttgctcgataagcgtacgccagcgaacattaccgcgtcctttttcaggcaagctgtcatcgtaaatagcccagctattgccgccctgcaatcccgcattacgcgtggcagactctgcatgttccattacctgctcggtatcctgaccactacgccaggcgcagataccaatgtggatcatatcgtcgcgatcgagcattttattgttcggcaaggtatcaacggctttgattaactgaccggcgatgctctctgcctcttttaacgtccggtgcggtaacagcgcagcaaaatcactgcggtggtaacgcgccagcagtgcgccagggtagcgcatcataaatgtgctcagcagattcgtcagagtgaagaactgttcttcaacctggctgtgcccccaggtatcgctcaacatattgaaatccggcagacgaatcatcatcacgatcccgtgggtacctactttctcctgatcttccagtaacgttgctaactgattatcgaaaaagagtcggttattgaggccggttttcacgtcctgggcggcataagagcggatcagcgtatcaagacggctgtgttgttcgcgtgcgttctgaatttcacgaagcagcgtatccagcgcactgctggttctgggcggccattcatagatggttcccaacacattagagccacgctcaccgtttaagatacgagtagcccgggtttccagcaattcttgcccggcaagttgccgttgtaaccagcgtaccgccaggaagagcataacaatgataaagccaatcgcccccgtgagcggcgcggtggtcatcaagctatggaaatagttgcccatcggatcctgataaaccagacgcaagctcatccccggatgctttatcaacggaacgctcagttcgcgaaacagatcgctggagccaactggacgataactaccatttctggccagggtataaacctgtttatcaccatggagcaggtctacacgaacgatatctgcgctcatcattaattcggtaatttgtggccttaatacgctgaagtcattgctcacaaggtgggtatcaatcgccgtcgccaccgcctgaacgcgatgactaaacttatactgaatggcgttgtagaaacttaggctacagcccagcaaagtcacaaaaattgttaacccggtgagcagcgtaacaaaggcgctaaatttcgtcgttaatctcatccttgtgttaactccgatagtgaggaagcgggcatactagcaaatcagatttatctcgcaatttattgcgcttcatcggctttgcttttccattagcgagtatagtcttcagaaattattttccaatccatcatgcacatgaggaccacttatgcaggcgttacttttagaacagcaggacggcaaaactctcgcaagtgtacagactctggacgaaagtcgcctgccggagggcgatgtcacggtcgatgttcactggagcagcctgaactataaagatgcgctggcgattaccggtaagggaaaaatcatccgtaattttccgatgattcctgggatcgattttgccggaactgtacgcaccagcgaagatccgcgttttcatgccggtcaggaggtgttactcactggctggggcgttggtgaaaaccactggggtgggctggcggagcaggcgcgagtgaaaggtgactggctggttgccatgccgcaagggctggacgcgcgtaaagcaatgattatcggtactgccggttttaccgccatgctgtgtgtgatggcgctggaagatgccggtgttcgcccgcaggacggggagattgtcgtgacgggtgccagtggtggcgtcggcagtaccgccgtggcgctgctgcataagttgggttatcaggtcgttgccgtttccggtcgcgaaagtacccatgaatatctgaaaagtttaggtgctagccgtgttctccctcgtgatgagtttgccgaatcccgtcctctggaaaaacaagtctgggctggggcaattgacaccgttggcgacaaagtgctggcaaaagtgctggcgcaaatgaattacggcggctgcgtggcggcctgtggtctggcgggtggttttactctgccaaccacggtcatgccatttattctgcgtaatgtccgtttgcaaggggtggatagtgtaatgacgccaccagaacgccgcgcacaagcctggcagcgactggtcgccgatttaccggaaagtttctatacccaggcggcaaaagagatatctctgagtgaggcaccgaactttgccgaggccatcattaataaccagatccagggtcgcacgctggtgaaggttaactaaccatttagcagggaataataagagagggaactcattttgaaatcattattcaatcggttaacgggaaaagcggttagccggacagctttcgtcgaacaccttggtcaggaagttatacaacatcatccaaactggaaagtcatgatttcgactgaccacaaattgatgcgcattgatactccactaaacagctattattgatacgcctccgtcgcctgttaggtttatgttgctttgcctgggcgacgctacgcttagccccttacttatttctggtaccatggggtgaataatctgattttgtttgactacaaattaatcactcgaacctatttaatgctgagcattgtcaatcggttaattttgcgtgctttagcattcacatctatccagacgatgcagtgaaaattgggtaatccccagcaaccgctgcgtaatgtcgtctatcttgtcgcgatcctggcatccctacattatttgtggtctgtgaagattatctcattgcagcccctcatcttcgcagggctggcttttcagcttttcaccttacgttataagaagttccgtcgatgatggcgctaatttcgtgaattgtgcggcttgttgcaaattacacggtgttgaaggttatttacatgttagctgttgattatcttccctgataagaccagtatttagctgccaattgctacgaaatcgttataatgtgcgacctcgtcctccctgacgcagtttttgcgctgcggaaaaggtgacattggcgcaacgaaggtatattttgttttttgccggaggatagcagcagatcgctgcacaatgtccgtcaagtctaacattgacactctggggcaaaatagaccggcgtcccggcctgctggaatttatcgctatgcatacagctgtcggggcatacgctttacagacggcggtgaaacgcctgtcacaatcacactaaacaaagagtacggaacccactcatggatattcgtaagattaaaaaactgatcgagctggttgaagaaagtggcatctccgaactggaaatttctgaaggcgaagagagtgtacgcattagccgtgcagctcctgccgcaagtttccctgtgatgcaacaagcttacgctgcaccaatgatgcagcagccagctcaatctaacgcagccgctccggcgaccgttccttccatggaagcgccagcagcagcggaaatcagtggtcacatcgtacgttccccgatggttggtactttctaccgcaccccaagcccggacgcaaaagcgttcatcgaagtgggtcagaaagtcaacgtgggcgataccctgtgcatcgttgaagccatgaaaatgatgaaccagatcgaagcggacaaatccggtaccgtgaaagcaattctggtcgaaagtggacaaccggtagaatttgacgagccgctggtcgtcatcgagtaacgaggcgaacatgctggataaaattgttattgccaaccgcggcgagattgcattgcgtattcttcgtgcctgtaaagaactgggcatcaagactgtcgctgtgcactccagcgcggatcgcgatctaaaacacgtattactggcagatgaaacggtctgtattggccctgctccgagtgtaaaaagttatctgaacatcccggcaatcatcagcgccgctgaaatcaccggcgcagtagcaatccatccgggttacggcttcctctccgagaacgccaactttgccgagcaggttgaacgctccggctttatcttcattggcccgaaagcagaaaccattcgcctgatgggcgacaaagtatccgcaatcgcggcgatgaaaaaagcgggcgtcccttgcgtaccgggttctgacggcccgctgggcgacgatatggataaaaaccgtgccattgctaaacgcattggttatccggtgattatcaaagcctccggcggcggcggcggtcgcggtatgcgcgtagtgcgcggcgacgctgaactggcacaatccatctccatgacccgtgcggaagcgaaagctgctttcagcaacgatatggtttacatggagaaatacctggaaaatcctcgccacgtcgagattcaggtactggctgacggtcagggcaacgctatctatctggcggaacgtgactgctccatgcaacgccgccaccagaaagtggtcgaagaagcgccagcaccgggcattaccccggaactgcgtcgctacatcggcgaacgttgcgctaaagcgtgtgttgatatcggctatcgcggtgcaggtactttcgagttcctgttcgaaaacggcgagttctatttcatcgaaatgaacacccgtattcaggtagaacacccggttacagaaatgatcaccggcgttgacctgatcaaagaacagctgcgtatcgctgccggtcaaccgctgagcatcaagcaagaagaagttcacgttcgcggccatgcggtggaatgtcgtatcaacgccgaagatccgaacaccttcctgccaagtccgggcaaaatcacccgtttccacgcacctggcggttttggcgtacgttgggagtctcatatctacgcgggctacaccgtaccgccgtactatgacagtatgatcggtaagctgatttgctacggtgaaaaccgtgacgtggcgattgcccgcatgaagaatgcgctgcaggagctgatcatcgacggtatcaaaaccaacgttgatctgcagatccgcatcatgaatgacgagaacttccagcatggtggcactaacatccactatctggagaaaaaactcggtcttcaggaaaaataagactgctaaagcgtcaaaaggccggattttccggccttttttattactggggatcgacaacccccataaggtacaatccccgctttcttcacccatcagggacaaaaaatggacactcgttttgttcaggcccataaagaggcgcgctgggcgctggggctgacccttttgtatctggcagtttggttagtagccgcttacttatctggcgttgcccccggttttaccggctttccgcgctggtttgagatggcctgcatcctgacgccgctgctgtttattggactgtgctgggcgatggtgaaatttatctatcgcgatatcccactggaggatgacgatgcagcttgaagtaattctaccgctggtcgcctatctggtggtggtgttcggtatcagcgtttatgcgatgcgtaaacggagcaccggcaccttccttaatgagtatttcctcggcagccgctctatgggcggtattgtgctggcgatgacgctcaccgcgacctatatcagtgccagtagctttatcggcgggccaggagctgcttataaatacgggctgggctgggtattgctggcgatgattcagcttcctgcagtctggcttagtctcggtattctcggcaagaagtttgcgattcttgcgcgccgctacaatgcagtgacgctgaacgatatgctgtttgcccgctaccagagtcgtcttctggtgtggctggcgagtttgagtttgctggttgcgttcgttggtgcgatgaccgtgcagtttatcggcggtgcgcgcctgctggaaaccgcggcgggtattccttatgaaaccgggctgctgatttttggtatcagcattgcgttatataccgcctttggtggctttcgcgccagcgtgctgaacgacaccatgcaagggcttgtgatgctgattggcaccgttgtgctgcttattggcgtagtacatgccgctggcggcttaagtaacgcagtacagaccttgcaaaccatcgatccgcaactggttacgccacaaggcgctgacgatattctgagccctgcctttatgacgagcttctgggtactggtgtgttttggcgtgattggcctgccgcatactgcggtgcgctgtatctcttataaagacagcaaagccgtacatcgggggatcatcatcggtacgattgtggtcgcaattctgatgttcggtatgcacctggccggagcgttaggtcgggcggtgatccccgatctcaccgtaccggacctggtgatcccaacgttaatggtaaaagtgctgccaccgtttgctgccgggatcttcctggctgcaccgatggctgcgatcatgagcacaattaacgcccaactgctgcaaagttccgctacgatcattaaagatctctatctgaatatccgtccggatcaaatgcaaaacgagacgcgtctgaagcggatgagcgcggtaattacgttagttctcggcgcgttgctgctgcttgccgcctggaagccgccagaaatgatcatctggctgaatttgttggccttcggtgggctggaagccgttttcctgtggccgctggtgctgggtctttactgggaacgcgccaacgccaaaggcgcgctaagtgcgatgatcgttggcggcgtgctgtatgccgtactcgcgacgctgaatattcagtacctgggcttccaccctatcgtgcccagcttactactaagtttgctggctttcctggtcggaaaccgtttcggtacatccgtcccgcaagctaccgttttgactactgataaataaagagttttgccatgccttggatccaactgaaactgaacaccaccggcgcgaacgcggaagatcttagcgatgcgctgatggaagcgggtgccgtttctatcacttttcaggatacccacgatacgccagtatttgaaccgctgccgggcgaaacgcgcctgtggggcgacaccgatgtgattggtctgttcgacgctgaaaccgatatgaacgacgtggtggcgattctggaaaaccatccgctgctcggcgcaggcttcgcgcataaaatcgaacaactagaagataaagactgggagcgcgaatggatggataatttccacccgatgcgctttggtgaacgactgtggatctgccctagctggcgtgatgtgccggacgaaaacgccgtcaacgtgatgttagatccagggctggcgtttggtacgggtacccatccaaccacctctctgtgcctgcaatggctcgacagcctcgatttaaccggtaaaacagtcatcgactttggctgtggttccggcattctggcgatcgcggcgctgaaactgggtgcagcaaaagccattggtattgatatcgatccgcaggcgattcaggccagccgcgataacgccgaacgtaatggcgtttctgaccgtctggaactctacttaccgaaagatcagccagaagaaatgaaagccgacgtggtggtcgctaacatccttgcaggcccattacgtgaactggcaccgttaatcagcgtcctgccggttagtggcggtttgctgggcctttccggtattctggcaagccaggcagagagcgtttgtgaagcttatgccgatagcttcgcactggacccggtcgtggaaaaagaagagtggtgccgtattaccggtcgtaagaattaaccttcgcatcgccgtagggtgacgcggggcgaagtgcgagcaagctcacaaaaggcacgtaaatttgccgattatttacgcaaatttgcgtgccaaaattttcattcataaagaaaaattgagaacttactcaaatttctttgagtgtaaattttagtcactattttctaatatgatgatttttatgagtaattatcgcaccacgctcattttaaatgcaattctttgatccatctcagaggattggtcaaagtttggcctttcatctcgtgcaaaaaatgcgtaatatacgccgccttgcagtcacagtatggtcatttcttaactcatgcgcatcggacaatatcagctcagaaatcgcctgatcgcagcgcccatggctggcattacagacagaccttttcggacgttgtgctacgagatgggagccggattgacagtatccgagatgatgtcttctaacccacaggtttgggaaagcgacaaatctcgtttacggatggtgcacattgatgaacccggtattcgcaccgtgcaaattgctggtagcgatccgaaagaaatggcagatgcagcacgtattaacgtggaaagcggtgcccagattattgatatcaatatgggttgcccggctaaaaaagtgaatcgcaagctcgcaggtagtgccctcttgcagtacccggatgtcgttaaaagcatccttaccgaggtcgtcaatgcagtggacgttcctgttaccctgaagattcgcaccggctgggcaccggaacaccgtaactgcgaagagattgcccaactggctgaagactgtggcattcaggctctgaccattcatggccgtacacgcgcctgtttgttcaatggagaagctgagtacgacagtattcgggcagttaagcagaaagtttccattccggttatcgcgaatggcgacattactgacccgcttaaagccagagctgtgctcgactatacaggggcggatgccctgatgataggccgcgcagctcagggaagaccctggatctttcgggaaatccagcattatctggacactggggagttgctgcccccgctgcctttggcagaggttaagcgcttgctttgcgcgcacgttcgggaactgcatgacttttatggtccggcaaaagggtaccgaattgcacgtaaacacgtttcctggtatctccaggaacacgctccaaatgaccagtttcggcgcacattcaacgccattgaggatgccagcgaacagctggaggcgttggaggcatacttcgaaaattttgcgtaaacagaaataaagagctgacagaactatgttcgaacaacgcgtaaattctgacgtactgaccgtttctaccgttaactctcaggatcaggtaacccaaaaacccctgcgtgacagcgttaaacaggcactgaagaactattttgctcaactgaatggtcaggatgtgaatgacctctatgagctggtactggctgaagtagaacagcccctgttggacatggtgatgcaatacacccgtggtaaccagacccgtgctgcgctgatgatgggcatcaaccgtggtacgctgcgtaaaaaattgaaaaaatacggcatgaactaattcaggttagctaaatgcttgattaaaaaggcgctactcggcatggggaagcgccttttttataggtgtcacaaagggagtgaccatgagaacaggatgtgaaccgacccggtttggtaatgaagctaagaccattattcacggtgatgcgcttgccgaacttaaaaagatccccgccgaaagtgtcgatctgatctttgccgacccaccatataacatcggtaaaaattttgatggtctgatcgaagcctggaaagaagatctgtttatcgactggctgtttgaagtgattgcagagtgccaccgcgttctgaaaaagcagggcagcatgtacatcatgaacagtacggaaaacatgccctttatcgatctccagtgccgcaagctttttaccatcaaaagtcgcatcgtctggagttatgacagttctggagtgcaggcgaaaaaacactacggctccatgtacgaacccatcctgatgatggtgaaagacgcaaagaactacacattcaacggtgatgctattctggtagaagccaaaaccggaagccagcgcgcgttgatcgattatcgcaaaaatcctccacagccttacaatcatcaaaaagtaccgggtaacgtttgggattttccgcgcgtgcgttatttgatggatgaatatgaaaaccacccgacgcaaaaaccggaagccttactgaaacgcattattctcgcctcttccaacccaggcgatatcgttctcgacccgtttgctggtagctttactaccggtgccgtagccatcgccagcggacgaaaattcattggtattgagatcaacagcgagtacatcaaaatggggcttcgacggctggatgtcgcgagccattactctgcggaagaactggcgaaagtgaaaaaaagaaagaccggcaacctgagtaaacgaagccggttaagcgaagttgaccccgatctcattacaaagtaaaggatgtgtaagcctggttttcagattattcatttcgtgtatatttcctgccagacttggttaaacatgcacaggctcaggtaatgattcgcaagtattggtggctcgtcgttttcgctgtcttcgtttttctgtttgatactttactgatgcagtggattgaactgctggcaacagaaacagacaaatgccgcaatatgaacagtgttaatccactaaaactggttaactgtgacgaactgaattttcaggacagaatgtgaatttacatgacacttaattcattcgtttgatgaattaatttcgttatgttttcatctggcatgaacattcttaatacgttatcgaccagagcgggggcttgtttataaagatcataacccgccatattcattaaccagttttgaacaattccgctgaaggcaccatcaataataatcatcacaacatctaaatcgaggttatttgctacacaaccttgttgctgacacgcctgcaatacttcgcggagagtctgcggattaaagcccatcttttcgcgtatcactccctcggccagcatctcatcattaaattcacatttgtgatataagattttcagcaacgcctgctggcggggaattttggcaatatattgcaagccgacaatcaatttttcacgcaattgttgaaacgggtcatgctctaatccagccgtcaagtgttcctggattaactcccgcaaactaggctgttgcaaccacatctcattaaacagttgagtcttgttttcgaagtgccagtagatagcgccacgcgtaacgttagcggcgtcggcaatgtcgttgagcgtcgtcttgcttacgccatgctgcgcaaactgggcgatggcagtttcaatcagttcttgccgggtcttcagagcttcggctttggttctttttgccatgattaattattcaggaaataaatatattcgacacagagtgagaaaatagcgaaggttaatctatcacctaatgtgtatttatacgagaggctaatattgagttgctataaatcgttaaataaataatatatattatttacctaagatacattcactacatcaatatatatttcaatttacgaggttttaattctgcctctttcaacccgcgtcaaaataaaacagtagaatattaatctttttttgtgtttatgtgccttgagatgcctgtattcataactattccttacatcgacgaatgataatttgtaggatagcgaactgtatttttctttctgcgagttaacgcgttgcctttttgggtaaataacgcgcttttggttttttgaggaatagtaatgacgaaacatgccaggtttttcctcctgccctcctttattctgatctccgcggctttaatcgccggttgtaacgataagggagaagagaaagctcacgtcggtgaaccgcaggttaccgttcatattgtaaaaacggccccgttagaagttaagactgaattaccaggccgcaccaatgcttatcgtatagccgaagttcgcccacaggttagcgggatcgtactgaatcgcaatttcactgaaggcagcgatgtgcaagcaggccagtccctgtaccagatcgatcccgcgacctatcaggcaaattatgacagcgcgaaaggcgaactggcgaaaagtgaagccgccgccgccatcgcgcatttgacggtaaaacgttacgttccgctcgtgggtacgaaatacatcagccagcaggagtacgaccaggccattgctgatgctcgtcaggccgatgccgccgtgattgccgcaaaagccacagtcgaaagcgctcgcatcaatcttgcttataccaaagtcactgcgccaattagcggacgtatcggcaaaagcactgtgaccgaaggcgctcttgtcactaatgggcaaacgactgaactggcgactgtccagcagctcgatcctatctacgttgatgtgacccaatccagcaacgattttatgaggctgaagcaatccgtagagcaaggaaatttgcataaggaaaacgccaccagcaacgtagagttggtcatggaaaacggtcaaacctatcccctgaaaggtacgctgcaattctccgatgtgaccgttgatgaaagcaccggctccataaccctacgtgctgtcttccctaacccgcaacatacgcttttgccgggtatgtttgtgcgtgcacggattgatgaaggcgtccaacctgacgccattcttatcccgcaacaaggcgttagccgcacaccgcgtggtgatgcaaccgtgctgattgttaacgataaaagtcaggttgaagcgcgccctgtcgttgccagtcaggcgattggcgataaatggttgattagtgaaggactgaaatctggcgatcaagtcattgtcagcggcctgcaaaaagcgcgtccgggagagcaggttaaagccactaccgatacccccgcagatactgcaagcaagtaaggtaatctgacatggcaaacttttttattcgacgaccgatatttgcatgggtgctggccattattctgatgatggcgggcgcactggcgatcctacaattgcccgtcgctcagtatccaacaattgcaccgcctgcggtttctgttagtgcaaactatccgggcgctgatgcgcagaccgtgcaggatacggtgacgcaggttatcgaacagaatatgaacggtatcgataacctgatgtatatgtcctccaccagcgattccgccggtagcgtgacaattacccttaccttccagtccgggaccgatcctgatatcgcgcaagtgcaggtgcagaacaaactccagctcgccacgccgttgctgccgcaggaggttcagcagcaggggatcagtgttgaaaagtccagtagcagctatttgatggtggcgggctttgtctctgataacccaggcaccacacaggacgatatcagcgactatgtggcctctaacgttaaagatacgcttagccgtctgaatggcgtcggtgacgtacagcttttcggcgcacagtatgcgatgcgtatctggctggatgccgatctgctaaacaaatataaactgacaccggttgatgtgattaaccagttgaaggtacagaacgatcagatcgctgccggacagttgggcggaacgccagcgttaccagggcaacaattgaacgccagcattattgctcagacgcggtttaaaaatccggaagaattcggcaaagtgaccctgcgcgtaaacagtgacggcagcgtggtacgcctgaaagatgtcgcacgggttgaacttggcggtgaaaactataacgttatcgctcgtatcaacggaaaaccggcggcgggcctggggattaagctggcaaccggcgcgaatgctctcgataccgcgaaagccattaaggcaaaactggcggaattacagccattcttcccgcagggaatgaaggttctctacccttatgacaccacgccattcgtccagctttctattcacgaagtggtaaaaacgctgttcgaagccattatgctggtgttcctggtgatgtatctgttcttgcagaatatgcgagcaacgctgatccccgccattgcggtacccgtggtgttgttagggacgtttgccatcctcgccgcttttggttactccatcaacacactaacgatgttcgggatggtgcttgccatcgggctgctcgtcgatgatgcgatagtggtggtggagaacgtcgagcgcgtgatgatggaggataagctcccgccaaaagaagcgacggaaaaaagcatgagccaaattcagggcgcactggtgggtatcgcgatggtgctgagtgcggtatttattccgatggcattcttcggcggttctactggggcaatttatcgccagttctctatcaccatcgttagcgcaatggcgctttctgttctggtggcattgattcttacccctgcgttatgtgcaacgctgcttaaacccgtctctgctgagcatcacgaaaataagggcggtttcttcggttggtttaataccaccttcgatcatagcgttaaccactacaccaacagcgtcggcaaaatcctcggatccacaggacgatatttactgatctatgcgctgattgttgcaggaatggtggtgttgtttttacgtcttccgtcttccttcttacctgaagaggatcagggtgtctttctgaccatgattcagttacccgctggcgcgacgcaagagcggacgcaaaaagtgttggatcaagttacggattactatctgaagaacgagaaagcgaacgttgaaagtgtctttacggttaacggctttagcttcagcggccaggcacaaaacgccggtatggccttcgtcagtctgaaaccgtgggaagagcgtaatggtgacgaaaacagtgcggaagcggtaatccatcgtgccaaaatggaattgggcaagatccgcgacggttttgtcattccattcaatatgccagccattgttgaactgggcacggcaacgggtttcgactttgagttaattgatcaggctgggctgggtcacgatgccctaacccaggcccgtaaccagttgcttggtatggcggcgcaacatcctgccagcttagtcagcgtgcgccctaatggcctggaagacaccgcgcagtttaaactggaagttgaccaggaaaaggcgcaggcattaggtgttagtctttctgacatcaatcagaccattagtacggcgctgggtgggacttacgttaacgacttcatcgaccgtggccgcgtgaaaaagttgtatgttcaggcggatgccaaattccgtatgctgccagaagatgtcgataaactttatgtccgcagcgccaacggcgaaatggtgccattcagcgcctttaccactagtcattgggtgtatggctctccgcgactggaacgctacaacggtctgccgagtatggagattcagggggaagccgcgccaggaaccagttccggcgatgccatggcgttgatggaaaaccttgcgagtaaattacctgcgggcattggttatgactggacgggtatgagctatcaggaacgcttaagcggaaaccaggctcccgctctggtagcaatttcctttgtggttgttttcctgtgccttgctgcactctatgaaagctggagtattcctgtcagcgttatgttggtagtgccgttagggattgtcggcgtgctgctggcggcgacactctttaatcaaaaaaatgacgtctactttatggtgggcttgctaacgacaattggcttgagcgccaaaaacgctattttgatcgttgagttcgctaaagatctcatggagaaagagggtaaaggtgttgttgaagcgacactgatggcagtacgtatgcgtctgcgtcctatcctgatgacctctctcgcctttattctcggcgtattaccgctagctatcagtaacggtgccggcagtggcgcgcagaacgctgtgggtatcggggtaatgggaggaatggtctctgcaacgttgctggcaatcttcttcgtaccggtgttctttgtggtgatccgccgttgctttaaaggataaatcagaaacataaaggcgctttcgggtgcctttattatttccagtgaaacccataaaaattaataagatattcttctgctcactctttaaaagctttctatagttcccgctcccttcactatttttacaattcacataatttgtcattattcattccgcaagatttataacctccggtgataaaatggcattcagctcgttaataagagagttaacttattaagcgttagcgtttattactgaggtaacaccatgaaaagattaattcctgtggcattgctcaccgcattgctggcgggctgtgctcacgatagcccctgcgttccggtttatgacgatcagggtcgtctggttcacaccaatacctgtatgaaaggcacgactcaggataactgggaaacggctggggctattgccggcggggcagctgctgttgctggcctgacgatggggatcatcgctctaagcaaataactgaacagggcgcggagttccgcgctctttttaacgatacagtatctctccataagataaaatattgctatattctgctgggtaattccctgctgatttagcatgttacatcgcgttatttcgctgctttcgaaataacgcatcaatttaattttcacacttcccaccagaaatatactcacgctaacaatcattattctgcttagtaaaacacgcgtaaatattttgcgccaaaatgtggcgcatgtttcattttcgcaccattgcggggcgctgtttttattatttcctgtctacactcagcttattgcgacgcgaaatcgtgcgcaaaagctggcactacttttgcttataagaggatggccacagacaggtaaaagacgtttcccaaacgtcctataacgataattttcgcctcacaggaagcattatgaaaaagatgatgatagccacactggctgccgccagcgtgctgcttgccgttgcaaatcaggcgctgctggcgcgacgcttgatgccgttcagaaaaaaggttttgtgcaatgcgggatcagtgatggattacctgggttctcttatgccgatgctgacggtaagtttagtggtattgatgttgatatttgtcgtggtgttgccgctgctgtatttggtgacgacacgaaagtgaaatataccccgctcactgcaaaagaacgcttcaccgctttacagagtggggaggtggatttgctctcccgtaatacgacctggactagttctcgcgatgccgggatgggaatggcatttaccggcgtcacttattacgacggcattggcttcctgacgcacgataaagcggggctaaaaagcgcgaaagaactggatggcgctaccgtctgtattcaggcgggtactgataccgaactcaacgtcgccgactacttcaaggcaaacaatatgaagtacacaccggtgactttcgatcgctctgacgaaagtgcgaaggcactggaatctggtcgctgcgatacgctggccagcgatcaaagtcaactgtatgccctgcgcatcaaattaagcaacccagctgaatggattgtcttaccggaagttatcagtaaagaaccgcttggtccggtagttcgtcgtggcgatgatgaatggttcagcattgtacgctggacgcttttcgccatgctgaatgctgaagagatgggcatcaattcccagaacgtcgatgaaaaagcggctaatccagcaacgcctgatatggcacatctgctgggtaaagaaggcgattacggcaaggatctgaagctggataataaatgggcctataacatcatcaaacaggtgggtaactacagcgaaatttttgagcgtaacgtaggtagtgaaagcccgctgaaaattaaacgtgggcaaaataatctctggaataacggcggtattcagtacgcaccgcccgtgcgttaagtcggtgtgaggtaacgagcgtcgctacggcggcgctctcttcagcgttatgctttccgaggtttctatgtctcatcgccgcagtaccgttaaaggcagtctctcttttgccaaccctacggttcgcgcctggttattccagatccttgccgttgttgctgttgtcggcattgttggttggttatttcacaacactgtaacgaatctcaataatcgtggcattactagtggttttgcctttctggatcgcggcgctggcttcggtattgtccagcatttgatcgattaccagcagggcgacacctacggacgcgtttttattgtcggcttactcaatacgctactggtttctgcattgtgtattgtgttcgcttctgttttgggcttctttatcggtctggcgagacttagcgataactggctgctacgaaagctttccacaatttatattgagatcttccgtaatattcccccgctgctgcaaatcttcttctggtactttgccgtgttgcgcaatttgcccggaccacgccaggctgtgagcgcgtttgatctggcctttttgagcaatcgtgggctttatattccgagtccgcagctgggagacggatttattgcgtttatcctggctgttgttatggctatagtcctttctgttgggctattccgctttaataaaacataccagataaagaccggacaactgcgccgcacctggccgatcgccgcagtgttgatcattggtttgcctttactggcgcaatggctttttggcgcagcactacactgggatgtcccagccctacgaggctttaacttccgcggcgggatggttttaattcctgaactggcagccttaacgctggcacttagcgtttatacatctgcatttatcgccgagattatccgcgctgggatccaggcagtgccttatggtcaacatgaagcggctcggagtctgggattacccaacccggttacgctacgccaggtcattattccccaggcattgcgggtgattattccaccgttaaccagccagtatctcaacatcgtcaaaaactcctctcttgccgccgctattggctatcccgatatggttagcctgtttgccggcaccgtgctgaatcagacggggcaagccatcgagacgatagccatgaccatgagcgtctatctgattatcagcctgactatcagcctgctgatgaatatctataaccgccgcatcgcgatcgttgaacgctaaggagtcatgatgacaaaagtattgctgtctcatcccccgcgcccggcgagccataacagtagccgcgcgatggtgtgggtgcgaaaaaatctgttctccagctggagcaatagcctgctgactattggctgcatatggttgatgtgggaactgatcccaccgttgctgaactgggcatttttgcaggctaactgggttggcagtacgcgtgccgactgcacaaaagccggtgcctgttgggtcttcatccacgaacgatttggtcagtttatgtatgggctttacccacacgaccaacgctggcgaattaacctcgcattactgattgggcttgtgagcatcgcaccaatgttctggaaaatactcccgcatcgcggtcgctatattgcggcctgggcggtgatttacccactgattgtctggtggctgatgtatggcggtttttttgctcttgagcgggttgaaacccggcaatggggcgggctgacgctaactttaattattgcaagtgttgggattgcgggggcgctaccgtgggggatcttactggcgttaggtcgccgctcccatatgccgattgtgcgtatcttaagcgtcatttttatcgaattctggcgcggcgtgccgctgattaccgttctgtttatgtctagcgtcatgctgccgttgtttatggcagaaggcaccagtatcgacaaattgatccgcgcgctggttggcgtgatcctgtttcagagtgcatatgttgcggaagtcgtgcgaggtggattacaggcgctgcctaaagggcaatatgaagcggcagagagcctggcgttgggttactggaaaactcaggggctggttattctgccacaggcgttgaagctggtaattcctgggctggtaaataccatcatcgcactcttcaaagataccagcctggtgatcattatcgggttgttcgatcttttcagtagcgttcagcaggcaaccgttgatcccgcctggttgggtatgagcacggaagggtatgttttcgccgcgctgatctactggatcttctgtttcagcatgagccgctatagccagtatctggaaaaacgttttaacaccgggcgtacaccgcattgaggacactatgagccaaattttactgcaacctgctaacgcgatgattacgctggaaaacgtcaataaatggtatggacaattccatgttttgaaaaatataaatttaaccgtgcaaccgggagaacggatcgttctgtgtggccctagtggttccggtaaaagcacaaccattcgttgtattaatcatctggaagaacatcaacagggacggatcgtggtagatggcatcgaacttaatgaagatatccgcaatattgagcgcgtcaggcaggaagtgggaatggtctttcagcatttcaatctcttccctcatctgaccgttttacagaactgtaccctggcaccgatttgggtacgcaagatgcctaagaaagaggctgaagatctggcggtgcattacctagagcgggtgagaattgccgaacatgcgcataagtttcccggacagattagtggtggtcagcagcaacgcgttgccattgcgcgtagcctgtgtatgaagccgaaaattatgttgtttgatgagccaacgagcgcgctcgatcctgagatggtgaaagaggtgctggatacgatgattgggctggcgcagagcggtatgacaatgttgtgtgtaacacatgagatggggtttgcacgaaccgtcgctgaccgggtaatttttatggatcgtggggaaatagtggagcaagctgcacctgatgaattttttgcgcatcctaaaagtgagcgtacgagggcatttttaagccaggtaatccattaattgaatgttagttcgaaaagcaaaaaggccatcctttcggatggcctttcgcttgatttgatgtctggcagtttatggcgggcgtcctgcccgccaccctccgggccgttgcttcgcaacgttcaaatccgctcccggcggatttgtcctactcgggagagtgttcaccgacaaacaacagataaaacaaaaggcccagtcttccgactgagccttttgttttatttgatgtctggcagttccctactctcgcatggggagaccccacactaccatcggcgctacggcgtttcacttctgagttcggcatggggtcaggtgggaccaccgcgctactgccgccagacaaattcttttctaatctgccgaactttaacctaaaaagtggtgctgatacccagagtcgaactggggacctcacccttaccaagggtgcgctctaccaactgagccatatcagcacgctaaatttgatgcctggcagttccctactctcgcatggggagaccccacactaccatcggcgctacggcgtttcacttctgagttcggcatggggtcaggtgggaccaccgcgctacggccgccaggcaaattctgttttatcagaccgcttctgcgttctgatttaatctgtatcaggctgaaaatcttctctcatccgccaaaacagcttcggcgttgtaaggttaagcctcacggttcattagtaccggttagctcaacgcatcgctgcgcttacacacccggcctatcaacgtcgtcgtcttcaacgttccttcaggacccttaaagggtcagggagaactcatctcggggcaagtttcgtgcttagatgctttcagcacttatctcttccgcatttagctaccgggcagtgccattggcatgacaacccgaacaccagtgatgcgtccactccggtcctctcgtactaggagcagcccccctcagttctccagcgcccacggcagatagggaccgaactgtctcacgacgttctaaacccagctcgcgtaccactttaaatggcgaacagccatacccttgggacctacttcagccccaggatgtgatgagccgacatcgaggtgccaaacaccgccgtcgatatgaactcttgggcggtatcagcctgttatccccggagtaccttttatccgttgagcgatggcccttccattcagaaccaccggatcactatgacctgctttcgcacctgctcgcgccgtcacgctcgcagtcaagctggcttatgccattgcactaacctcctgatgtccgaccaggattagccaaccttcgtgctcctccgttactctttaggaggagaccgccccagtcaaactacccaccagacactgtccgcaacccggattacgggtcaacgttagaacatcaaacattaaagggtggtatttcaaggtcggctccatgcagactggcgtccacacttcaaagcctcccacctatcctacacatcaaggctcaatgttcagtgtcaagctatagtaaaggttcacggggtctttccgtcttgccgcgggtacactgcatcttcacagcgagttcaatttcactgagtctcgggtggagacagcctggccatcattacgccattcgtgcaggtcggaacttacccgacaaggaatttcgctaccttaggaccgttatagttacggccgccgtttaccggggcttcgatcaagagcttcgcttgcgctaaccccatcaattaaccttccggcaccgggcaggcgtcacaccgtatacgtccactttcgtgtttgcacagtgctgtgtttttaataaacagttgcagccagctggtatcttcgactgatttcagctccacgagcaagtcgcttcacctacatatcagcgtgccttctcccgaagttacggcaccattttgcctagttccttcacccgagttctctcaagcgccttggtattctctacctgaccacctgtgtcggtttggggtacgatttgatgttacctgatgcttagaggcttttcctggaagcagggcatttgttgcttcagcaccgtagtgcctcgtcatcacgcctcagccttgattttccggatttgcctggaaaaccagcctacacgcttaaaccgggacaaccgtcgcccggccaacatagccttctccgtccccccttcgcagtaacaccaagtacaggaatattaacctgtttcccatcgactacgcctttcggcctcgccttaggggtcgactcaccctgccccgattaacgttggacaggaacccttggtcttccggcgagcgggcttttcacccgctttatcgttacttatgtcagcattcgcacttctgatacctccagcatgcctcacagcacaccttcgcaggcttacagaacgctcccctacccaacaacgcataagcgtcgctgccgcagcttcggtgcatggtttagccccgttacatcttccgcgcaggccgactcgaccagtgagctattacgctttctttaaatgatggctgcttctaagccaacatcctggctgtctgggccttcccacatcgtttcccacttaaccatgactttgggaccttagctggcggtctgggttgtttccctcttcacgacggacgttagcacccgccgtgtgtctcccgtgataacattctccggtattcgcagtttgcatcgggttggtaagtcgggatgacccccttgccgaaacagtgctctacccccggagatgaattcacgaggcgctacctaaatagctttcggggagaaccagctatctcccggtttgattggcctttcacccccagccacaagtcatccgctaatttttcaacattagtcggttcggtcctccagttagtgttacccaaccttcaacctgcccatggctagatcaccgggtttcgggtctataccctgcaacttaacgcccagttaagactcggtttcccttcggctcccctattcggttaaccttgctacagaatataagtcgctgacccattatacaaaaggtacgcagtcacacgcctaagcgtgctcccactgcttgtacgtacacggtttcaggttctttttcactcccctcgccggggttcttttcgcctttccctcacggtactggttcactatcggtcagtcaggagtatttagccttggaggatggtccccccatattcagacaggataccacgtgtcccgccctactcatcgagctcacagcatgtgcatttttgtgtacggggctgtcaccctgtatcgcgcgcctttccagacgcttccactaacacacacactgattcaggctctgggctgctccccgttcgctcgccgctactgggggaatctcggttgatttcttttcctcggggtacttagatgtttcagttcccccggttcgcctcattaacctatggattcagttaatgatagtgtgtcgaaacacactgggtttccccattcggaaatcgccggttataacggttcatatcaccttaccgacgcttatcgcagattagcacgtccttcatcgcctctgactgccagggcatccaccgtgtacgcttagtcgcttaacctcacaacccgaagatgtttcacttcagagttgcgaaaatttgagagactcacgaacaactttcgttgttcagtgtttcaattttcagcttgatccagatttttaaagagcaaaacttcgcagtgaacctttgcaggtacactctgaagtattttttatttaatcactacagagatggtggagctatgcgggatcgaaccgcagacctcctgcgtgcaaagcaggcgctctcccagctgagctatagccccataacatgtagttaaaacctcttcaaatttgccgtgcaaatttggtaggcctgagtggacttgaaccaccgacctcacccttatcaggggtgcgctctaaccacctgagctacaagcctgtagaggttttactgctcattttcatcagacaatctgtgtgagcactgcaaagtacgcttctttaaggtaaggaggtgatccaaccgcaggttcccctacggttaccttgttacgacttcaccccagtcatgaatcacaaagtggtaagcgccctcccgaaggttaagctacctacttcttttgcaacccactcccatggtgtgacgggcggtgtgtacaaggcccgggaacgtattcaccgtggcattctgatccacgattactagcgattccgacttcatggagtcgagttgcagactccaatccggactacgacgcactttatgaggtccgcttgctctcgcgaggtcgcttctctttgtatgcgccattgtagcacgtgtgtagccctggtcgtaagggccatgatgacttgacgtcatccccaccttcctccagtttatcactggcagtctcctttgagttcccggccggaccgctggcaacaaaggataagggttgcgctcgttgcgggacttaacccaacatttcacaacacgagctgacgacagccatgcagcacctgtctcacggttcccgaaggcacattctcatctctgaaaacttccgtggatgtcaagaccaggtaaggttcttcgcgttgcatcgaattaaaccacatgctccaccgcttgtgcgggcccccgtcaattcatttgagttttaaccttgcggccgtactccccaggcggtcgacttaacgcgttagctccggaagccacgcctcaagggcacaacctccaagtcgacatcgtttacggcgtggactaccagggtatctaatcctgtttgctccccacgctttcgcacctgagcgtcagtcttcgtccagggggccgccttcgccaccggtattcctccagatctctacgcatttcaccgctacacctggaattctacccccctctacgagactcaagcttgccagtatcagatgcagttcccaggttgagcccggggatttcacatctgacttaacaaaccgcctgcgtgcgctttacgcccagtaattccgattaacgcttgcaccctccgtattaccgcggctgctggcacggagttagccggtgcttcttctgcgggtaacgtcaatgagcaaaggtattaactttactcccttcctccccgctgaaagtactttacaacccgaaggccttcttcatacacgcggcatggctgcatcaggcttgcgcccattgtgcaatattccccactgctgcctcccgtaggagtctggaccgtgtctcagttccagtgtggctggtcatcctctcagaccagctagggatcgtcgccttggtgagccgttaccccaccaacaagctaatcccatctgggcacatccgatgacaagaggcccgagggtccccctctttggtcttgcgacgttatgcggtattagctaccgtttccagtagttatccccctccatcaggcagtttcccagacattactcacccgtccgccactcgtcagcgaaacagcaagctgtttcctgttaccgttcgacttgcatgtgttaggcctgccgccagcgttcaatctgagccatgatcaaactcttcaatttaaaagtttgatgctcaaagaattaaacttcgtaatgaattacgtgttcactcttgagacttggtattcatttttcgtcttgcgacgttaagaatccgtatcttcgagtgcccacacagattgtctgataaattgttaaagagcagttgcgacgcggctttcagctcactgtcgcgaggtggcgtatattacgctttcctctttcagagtcaaccctgaatttcaggatttttttctcttcgttgttccgaccatcctgtgaagtgtttcacgttgtcgtctcaacggaggcgcattatagggatcccaattttttgcacaagtatttttttgatctttttttctgtttgttgttttttcaccctttttgctgcaatcgcacacaaaacggtgcttttttgcatactaaaagacttgcacaaggccaataatgcccccaaagtcattagtaaatcatttattgctgaggtaagtatgtctgatgttttacgcccataccgcgatctttttccacaaatcggtcagcgcgtaatgatcgacgatagcagtgtcgtgattggtgacgttcgtctggctgatgatgtggggatctggccgctcgttgtgattcgtggagatgtacattatgtacagatcggagcacgcaccaatatccaggatggcagtatgttgcatgtcactcataaatccagctacaacccagatggcaacccattaaccattggcgaagatgtcactgttggtcacaaggtgatgctccacggctgcaccattggcaatcgagttttggttgggatgggcagtattttacttgatggcgcaatagtagaagatgatgtgatgattggtgcgggtagtctggtcccacaaaataaacggctggagagcggatatctgtatctcggtagccccgtcaaacagatccgcccgttaagtgatgaagagaaggctgggttacgctattccgcgaataattacgtgaaatggaaggacgaatatctggatcagggtaaccagacccagccttgatcatcttcactttgttcctgaattaagttttccgcttcttcttccaggtcccagcgatgctgacgaaaactcgctaaccactgttctggcgtatctccagtaaagcgatacgccagactctcgccagagatcgcgcatgtcagttgcataccattcacgagagcgggaaaacatacacattttttattctcgtcccactcttccctgtccggaaactggatggcctgattcacgcggacaattcctcctgcaattgctttataactggttctacgtcaggcagaacaccgtgccagagaagaaaggcatgagccgcctgtgccaccagcattcctaaaccatcagcattacgcttactgcctcgctgctcacaccatgccagaaaaggagtttttcctttctgatagaacatgtcatagcaataaatgcctggatgaatgaggctactcgggatcgccggaatatcaccactgatgccactggatgttgcattaataatgagatcaaactcatgaccttccagttcgtccatactcaacgcctgaatactgccagtgtgcgcaaacaatttagccaactcttccgcgcgggataccgtccgattagttattgtcaccgcacagtccagggaaaggagtggcagtagtacgccgcgagatgctccaccagcgccgataagcagaatacgtaaaccagggcggataaaagacagacgttccagatcgcttaacaagcctacaccatcggtattgtcacccagcaggcgtccatcttctaaccgcatgagggtattaacagcaccagccaacgctgcccgttcagtaagctcatccgctctggcaaaagcctcttctttaaaaggcaccgtcacattcgcacctttaccaccagcactaaagaaagcgttcagtgtgttgatgaaatcattgatgggtgccaacacgcgcccatagggatgttcaatattcagttgctgagcaaattgctgatgaatgaatgggcttttgctgtgggctatcggattaccaaaaacagcataggtttccattatgttacccctgtcgaaacagttcacccgtcagggcatcgcggatttcactaggatttaaacgcccccccgtttcaccaggcacaaccgggaacgccgcgccaaattgtgcgcgaacttcgtctactgttcgacaaggtggcaatccactcaagttggcactggtagaaaccagcggtttaccataagcctggcacaaagcaaccaccaacggatggtcggtgactcgtacagcaaggctatcaaagcggcccgtcaaccagcgcggtgttgtcgcaggcgcgggaaagacaaaggtgacaggacctggccagcgggaaaaaatggtttcacgctgcacgtcagtcaacatggtgtcatcaatatagggtttaagctgctcgtaatttgctgcgattaaaatcagccccttatcaaccggacgctgttttaactccaacagtcgcatcactgctgtttcgctatcaggatcgcacccaacaccgaaaacggcttccgttggataggcgatgacacgttcttcattgagaacatctatcgcagctgcgatagcgtctctttgcaggttattattcacgttattattccgcgctaaccggctttccacattgtttactggcacaaaagtgttttacaccctgcgcggttttcttttcgatgagtagcggataatgacactcagggcattctccagctatgggtttgaagttaatggcaaattgacactccgggtagcgatcacaagagtgaaatgttttgccataacgggagcggcgctggaccagatggcccgtccgacattgggggcatgtaattgctgtttcgtccggtttatcgataagttcggtatgttcgcattcagggtagttaatgcaaccaataaacataccaaagcgtccctggcgtaataccagatttgcgccacatgcagggcaaacctgcccctccagaactttgacgatatgtccatccgcactagatttcagaggacggacgtagtcacacgccggatactgactgcatccaagaaacggaccgtgtttcccggatcgaataaccagttcagccccgcactttgggcaggactcattattacgcaccgtgaacagtgcacttttcgccataacaacttatgctgaattaaagaaatgattaatgcagcataccttcattcacttcaaagagtaattcttccatttgctggtacgcattttcgcagcccggaatattgaacaacaccatcaggatcacccatttcagatcatccagttcgaactctgcgttatccagcgcgagcactcgctctatcaccatttcacgagtttcaaggttgagcacctgaatctgctcaaggaaaagcagaaacccacggcagctggcatccagtcgttcacactcttccggtgtataaatacgcatggagagaggatcgctggccagttgcatcggttctgccaacccttcctgataatcagcaagtttttccagccatagcagggcattgtagatatcttctcgctcaaaacctgcgtcggtaagatcctgttcaagtttgtcttgatccacacgcaactcagcttctgtgtgaatataggtttcaaacaaatacattagtacgtcgaacatggcatgccctcctcaatcggacatagccgccgggtacagctgcgatccatcctgctaactccagttcgagtagttgagtaactacctctggcacaggttggccggcacgttcagcgacgacgtcaacaggtgttacctcatctcctacgttagccaggagctcaggaaatggcaatgccacgtcttgctgatctggactataaaaactattttcaggggcgtctggcaaccagtgcaatccaaattgcaagttttccagaatttcttccggttccgtcacaagaatcgcaccttgttttattaaccagtgaggcccttcgcttcccggattccctattggacctggcaaggcaaaaacttctcgcccctgctcaagcgcacaacgtgctgtcaccaggctaccactacgcaaagccgcttccaccaccagtacacctttacttagaccactgataatgcgatttcttcgtgggaaattgtaagcaaggggtggaacatcgaggggaaattcgctgacgagagcgcccccctgttcaagcagactggcagccagtcgggcatgacggcggggatgaatggtattaagtccattccccaatacagcaatgctgacgccatttacctgtaaggctgctttatgcgctacaccatcgattccacgcgccagtccactcgtaattgtcactccacgcgtcgccagagtttcgcaaaataatcgtccccatcgctcgccataccaactatgcgcccgactccccactacggcaagctgaaaactatgcagcgcgtgcagttctccttcaacaaacagtgcgccggggtaatctgtcgtcgccagaagttgaggaggataaaattcgctgtccgcaggaattaaatgatggttgggttgctccaaccaacaaagactgctttcgatactctttcgtggaaaactaagaaagcgttgtgcctgccgcaatgtaagccctgtttgctgcaatacaaccgcatcaatatggctctgttttgccacccagtgagcgatacggaccatatcatcgccgtacaagctgctgatactcattaaacgcagccaaatttctgtatcgaccatccttatctccctgccataagcagccttagcaatctttgcgattggtcagtgatgctgtcaatcagagggggatttgtctagaatagaagaaataatctttctaactcctgaacacatctctggagatttatgagcgttttgcaagtgttacatattccggacgagcggcttcgcaaagttgctaaaccggtagaagaagtgaatgcagaaattcagcgtatcgtcgatgatatgttcgagacgatgtacgcagaagaaggtattggcctggcggcaacccaggttgatatccatcaacgtatcattgttattgatgttagcgaaaaccgtgacgaacggctagtgttaatcaatccagagcttttagaaaaaagcggcgaaacaggcattgaagaaggttgcctgagcatccctgaacaacgtgctttagtgccgcgcgcagagaaagttaaaattcgcgcccttgaccgcgacggtaaaccatttgaactggaagcagacggtctgttagccatctgtattcagcatgagatggatcacctggtcggcaaactgtttatggattatctgagtccgctgaaacaacaacgtattcgtcagaaagttgaaaaactggatcgtctgaaagcccgggcttaaggataagaactaacgtgagtgaaagtctacgtattatttttgcgggtacacctgactttgcagcgcgtcatctcgacgcgctgttgtcttctggtcataacgtcgttggcgtgttcacccagccagaccgaccggcaggacgcggtaaaaaactgatgcccagcccggttaaagttctggctgaggaaaaaggtctgcccgtttttcaacctgtttccctgcgtccacaagaaaaccagcaactggtcgccgaactgcaggctgatgttatggtcgtcgtcgcctatggtttaattctgccgaaagcagtgctggagatgccgcgtcttggctgtatcaacgttcatggtagtctgctgccacgctggcgcggtgctgcaccaatccaacgcagtctatgggcgggtgatgcagaaactggtgtgaccattatgcaaatggatgtcggtttagacaccggtgatatgctctataagctctcctgcccgattactgcagaagataccagtggtacgctgtacgacaagctggcagagcttggcccacaagggcttatcaccacgttgaaacaactggcagacggcacggcgaaaccagaagttcaggacgaaactcttgtcacttacgccgagaagttgagtaaagaagaagcgcgtattgactggagtcttagcgcagcacagcttgaacgctgcattcgcgctttcaatccatggccaatgagctggctggaaattgaaggacagccggttaaagtctggaaagcaagcgtcattgatacggcaaccaacgctgcaccaggaacgatccttgaagccaacaaacaaggcattcaggttgcgactggtgatggcatcctgaacctgctcagcttacaacctgcgggtaagaaagcgatgagcgcgcaagacctcctgaactctcgtcgggaatggtttgttccgggcaaccgtctggtctgatagtccactcttctaagcccggtcttgccgggcgtttttatacttatgaaaaaacaacgtaatttacgtagcatggcggcccaggccgttgaacaagtcgtcgagcaagggcaaagtttaagcaacattctgccaccgctccagcaaaaagtttccgataaagacaaagcacttcttcaagagttgtgctttggcgtactgcgtacgcttagccagttagactggctgattaataagttaatggcccgtccgatgaccggcaaacagcggaccgtgcattacctgattatggttggtttgtatcaactgctttatacccgcattccacctcatgctgcgctggctgaaacggttgaaggcgctatcgcaattaagcgtccgcaacttaaagggttgataaacggtgtattacgccagttccagcgtcagcaagaagagttattagccgagtttaatgccagtgatgcacgttatctgcatccttcctggttgctgaagcgtctgcaaaaagcgtatccagagcagtggcaatccatcgtcgaagccaataaccagcgtccgccaatgtggctgcgtattaatcgtacgcatcattcccgcgacagctggcttgcattgctggatgaagcaggaatgaaaggtttcccgcatgcggattaccctgatgctgtacgtctggaaacacctgcacctgttcatgcgctacctggttttgaagacggatgggttaccgttcaggatgcaagtgcacaaggttgcatgacctggcttgcgccacaaaacggtgaacacattttggatctttgtgccgcccccggcggtaaaacaacgcatatccttgaggtggcaccagaagcgcaggttgttgcggttgatatcgacgaacagcgcctctctcgggtttacgacaatttaaaacgccttggtatgaaggcgaccgtgaaacaaggtgatggccgttacccttctcaatggtgtggcgagcaacagtttgatcgcattttattagatgcgccttgtagtgcaaccggtgtgattcgtcgccatccagatattaaatggttacgtcgcgatcgcgatatcccggaactcgcgcaattgcagtctgaaattctcgacgccatttggccgcatttaaaaaccggtggaactctggtctatgccacctgtagcgtgttaccggaagagaatagcctgcagattaaagcctttttgcaacgtaccgctgatgccgaactttgcgaaacaggaacaccagagcaaccgggtaaacaaaatctacctggtgccgaagagggcgacggcttcttttacgctaagctaatcaaaaagtgatgagataacgggtcgcgactgatgaaaattatcattctgggtgccggccaggttggcggcacactggcggaaaacctggttggcgagaacaacgatattactgttgtcgataccaacggtgagcgtctgcggaccttacaggataaatttgacctgcgggtcgtgcaggggcatggctctcatccacgcgtattgcgggaggcaggtgccgacgacgccgatatgctggttgctgtaaccagtagtgatgaaaccaatatggttgcctgccaggtagcctacagtcttttcaacacccctaatcgcatcgctcgtatccgcagtccagactacgtgcgcgatgccgataagctatttcatagtgatgctgtgccgattgatcatctgatcgcaccagagcagttggttatcgataatatttaccgactgattgagtatcccggcgcattgcaggtggtgaacttcgctgagggtaaagtcagcctggctgtggttaaagcctattatggcggcccgctgattggtaatgcacttagcaccatgcgcgaacatatgccacatatcgatactcgtgtggcagcaattttccgccacgatcgccccattcgtccgcaaggtagcaccattgttgaagctggtgatgaagtgttctttattgccgctagtcagcatatccgcgcggtgatgagtgaattacagcgactggaaaaaccgtataagcggatcatgctggttggtggcggtaatatcggtgcagggctggcgcgtcgtctggaaaaagattacagcgttaaactcatcgaacgtaatcagcagcgcgctgccgaactggcggaaaagttacagaatacgatcgtcttttttggtgatgcgagcgatcaagaactactggccgaagaacatatcgatcaagttgatctgtttattgccgtcaccaacgatgacgaggccaatatcatgtccgccatgcttgccaaacgtatgggtgcgaaaaaggtgatggtattgatccagcgtcgcgcttatgtggatctggttcaggggagcgttatcgatattgcgattagtccacaacaagcaactatttctgcgttgcttagccatgtgcgaaaagcagatattgttggtgtttccagtttgcgccgcggcgtagcagaagctattgaagccgttgctcacggtgatgaaagcaccagtcgcgttgtcggcagagtcattgacgaaatcaagctaccgccaggaacgattattggagcggtggtacgtggaaacgacgtgatgattgccaatgacaatctgcgcattgagcaaggcgatcacgtaattatgttcctcacagataaaaagtttattaccgacgtcgaaagactcttccagccaagccctttcttcttgtaattaataaggcgtctaatgacgccttattatttccctttgattatcaaggattaattaaattcattcctggcaggaaaatggcttaacatttgttagacttatggttgtcggcttcatagggagaataacatgagcattattaaagaatttcgcgaatttgcgatgcgcgggaacgtggtggatttggcggtgggtgtcattatcggtgcggcattcgggaagattgtctctagtctggttgccgatatcatcatgcctcctctgggcttattaattggcgggatcgattttaaacagtttgctgtcacgctacgcgatgcgcagggggatatccctgctgttgtgatgcattacggtgtcttcattcaaaacgtctttgattttctgattgtggcctttgccatctttatggcgattaagctaatcaacaaactgaatcggaaaaaagaagaaccagcagccgcacctgcaccaactaaagaagaagtattactgacagaaattcgtgatttgctgaaagagcagaataaccgctcttaacaagcgccactaagcagaagaccagtggtaaaaaagtgatttactttcttgccactggcctcccagttcccccgattgccatgttttccttttcgcatgtaactgcctttccccttcttatttttctctacgcgctgtcggaataagggatcatgtagtaatgcttctatcgcattatcctttatctgccctttagtatgctgatatcgactcataaaaactccagttggttatttaacggcgcgagtgtaatcctgccagtgcaaaaaatcaacaaccactcttaacgccactcgccccttgttcaagagcttcaagaatgctacaataaacactgctatgagcagtcccacaacaggcatcgttaaggcgttgcaaggaacgctgcatactctgcaactcggctatccgtgcttcgacttcctgcaatctttcctgcacaatgcctttactctcctgacaggtatggtgttcaggatcgatgcggatgctcagcaactcgcggatgctctccagactgaaacctagttgtctggcatggcggataaatttcaatcgctggagatcgctttcggtatataggcgaaacccaccttcagtacgcacttcatgctccatcatctgctgtttttcgtaataacgaatcgtgtcgggtgttacttccgccatttttgccagctcaccaatgcgatacatacatactccattagttatcgttgattttgtccaacaacttgtcagcataatcgccgcgtaaaaaatcggtactcaatccagcttgtcgcagcttcaattccagtaaactcaatcgacggctaacctcttgatattgcggatcatcgtgacggatacctttgagaatatccagaagctgaattgcttctctccgttgctcaagttctggcggtaagcaaccggcattcttcagcaagcgataccccgcacgtaattccggtggcacgtgagaatcatcatccagtatcaatggttcgccgctacctgccaggttatcaaactcacctttcgcttgcgcttctgctatatggcgctctgcccactggtcaagtaaccacataaatactccaggggatgaacaaaaagagtacagctattgtagataagtggggatactacgggtataaaaaaacccgccggggcgggtttttttacgttgcttcagattactctgcagcagcttctgctttctcactacgatcaaccagctcgatgtaagccatcggcgcgttgtcgcctgcacggaagccacacttcagaatacgagtgtaaccaccggcacggctcgcgaaacgcgggcccagttcgttaaacagttttgccacgatctcgttatcacgagtacgggtgaatgccagacgacgattagcaacgctatcagtcttggcaagagtaatcagcggctcaactacgcggcgcagctctttcgctttaggcagagtcgtcttgatgatttcatgacgaaccagactacctgccatattgcggaacatagcctggcgatggctgctgttgcggttcagttgacgaccactcttacgatggcgcatgaccttatccttctcagtaaaaccttaacctgtgattcggttactcgtcagcgatgcttgccggtggccagttttccaggcgcatgcccagagacagtccacgggaagccagcacgtctttaatctcagtaagagattttttaccaaggttaggcgttttaaggagctcaacctcggtacgctgtaccagatcaccgatatagtggatagcttctgctttaaggcagttagcagagcggacagtcaattccagatcgtcaacagggcgcagcaggatcggatcgaactctggtttctcttctttcacttcaggctgacgtacatcacgtaagtcaacgaaagcttccagttgttcagccagaatggttgccgcacgacgaatcgcctcttcaggatcgattgtgccgttggtttccatttcgatgaccagcttgtccaggtcggtacgctgttctacacgcgctgcttcaacattgtaggcaatacgctccacagggctgtagcatgcgtcgaccagcagacggccgattgggcgctcatcttcttcgctatgaattcgggtagaagccggcacataaccacgaccgcgctgaactttgatacgcatgctaatagacgcgttctcatcggtcaggtggcagatcacgtgctgcggcttgacgatttcgacatcaccgtcgtgggtgatatcggctgcagtcacagggccaatgccagatttattcaaggtaagaataacttcatctttgccctgaactctcaccgccagccctttcaggttgagcaggatttccaggatatcttcctgaacgccttctttggtgctgtactcatgtagtacaccatcaatctcaacctcggtcaccgcgcaacccggcatgctactgagcagaatacggcgcagtgcgttacccagagtatggccaaagccacgctctaaaggctcaagggtcaccttggcgtgcgtgctactcacttgctcgatatcaaccaggcgcggttttagaaactctgtcacagaaccctgcattgtgtcctctctttggtactaagctttacttggagtaaagctcgacgatcaggtgttcgttaatgtccgcagacagatcagaacgctccggcttacgcttaaacgtaccttccatcttgccagcatcaacttccagccaggttggcttttcacgctgctcagccagctccagagcggctttcacgcgagactgcttcttcgctttctcacgaatgcttacaacgtcattcggactaacctgataagaagcgatgttaacaacacgaccgtttaccataattgctttatggctaaccagctgacgtgcttctgcacgagtggcaccgaagcccatacggtatacaacgttgtccagacgaccttccagcagagccaacaggttttcaccggtgttgcctttcagacgtgctgcttctttgtagtagttacggaactgacgctccagcacaccatagatacggcgaactttttgcttttcacgcaactgcacaccatagtcagacagacgcggtttacgcgcaccgtgctggccaggagcttgttcaattttacacttggtatcgatcgcgcgaacgccagacttaaggaataagtcggtgccctcacgacggctcagcttgagcttaggacccaaatatcttgccattttctttctccaacaaacctggaaaacgaggcgttatacgcgacgttttttcggcggacgacaaccgttatgagggatcggagtcacatcagtaatgttagtgatgcggaaacctgcggcgttcagagcacgaatagtagattcgcggcctggacccggacctttaaccataacttccagattcttgatgccgtattctttcacggcgtcagcgcaacgctctgctgcaacctgagctgcaaacggagtggatttgcgagaaccacggaaaccggaaccaccggctgttgcccaacccaacgcgttaccctgacgatcagtgatagtcacgatggtgttgttgaaagaagcatggatatgagccacgccgtcagagacttgttttcttacacgtttacgtgcacgaattggtgcctttgccattattcaatcaccccgattatttcttgatcggtttgcgcggacccttacgggtacgtgcgttggtcttggtacgctgaccgcgaaccgggagaccacgacgatgacgcaaaccgcgatagcaaccaagatccatcaggcgcttgatgctcatgctgatttcacggcgcagatcaccttcaacgacaaatttggcaacttcgtcacgcagcgtgtcgatttgtccttcagacagctcactgatcttaacatcttcagcgatacccgctgcagccaggatggctttagaacgggtcttgccgacgccataaatgctagttaatgcgattacggcatgcttatgatcaggaatgttaatgcctgctatacgggccactatgcactcctactatttaatatgtacgttccatgctgaaaagcccgttttcaggatactcaaatggaaacgcacagacatacaaaagattggctggctaatctagccagctcaacccaactttgcaagaaaaatatgcgaaaaaatcagccttggcgctgtttatgcttcggctcggcactgcaaatcacacggatgacaccatcacgcttaacgattttgcagttacggcataatttcttgacggaagcacgaactttcatttttactctccgtaacttctcgggcgaccaattatcggccgtagcctttcaggttcgccttcttcaatgcagactcatactgactggacatcatcagagtttgcacttgagccataaagtccataatcacgacaacaacgataagcagactggtcccaccgaagtagaacggtactttcattgcatcacgcatgaactccgggatcaggcagataaaggtaatatacagcgcaccaaccagggtcaggcgggtcattactttatcgatatacttcgccgtttgctctcccggacgaattcctggtacaaatgcaccggacttcttcaggttatctgctgtttcacgcgggttgaaaaccaacgccgtgtagaagaaacagaagaagatgattgcagacgcatagagtaacacataaagcggttgcccaggctgcaaatacaggctaattgttgtcagccagttccaaccagtaccgcccccgaaccaactcgcgatggtcgccgggaacagaataatactggaagcgaagattgccgggattacccccgccatattcactttcagcggtaaatgtgtgctctgtgcagcatagacacgacgaccttgctgacgtttcgcgtagtttaccacaatgcggcgttgaccacgctcaacaaatacaacaaagaacgtcactgcaaatactaatactgcaaccaacagcaacacgaggaagtgcaggtcgccttgacgcgcttgctcgatagtatgggcaatggctggcgggagtcccgcgacaataccggcgaagataatgatactaataccgttgccgatacctcgttcagtaatctgttcgcccaaccacatcaggaacatggttcctgtgaccagacttacaacagcggtgaagtagaatgcaaagcccgggttaatcaccaggccttgcataccaggcatattcggcagaccggtagcaataccgatgctctggaatattgccagcaccagagtaccgtagcgggtgtactggctgatcttacgacgaccagactccccttctttcttaatttctgccaacgttgggtgaaccaccgtcagcagctggataatgatgctcgcgctaatatacggcatgatccccagagcaaagatagaagcacggctgagagcaccaccagagaacatgttaaacatctcaatgatggtgcctcgctgttgctcaagcagtttggcaagtacagcggcatcaataccagggatcggaataaaagagccaatacggaacacaatcagcgcaccgataacaaacagcagtctgcgtttcagctcgcctaagccacctttggcactttgaaaatctaatcccggttgtttagccatctgctacttattcctcgattttaccgccagcagcttcgatagcagcacgagcgcctttagtaacacgcaggccacgaacagttaccggagtcgttacttcgccagccaggatcactttcgcgaactcgatctggataccgataatgttagccgctttcagcgtgttcaggtctactacaccgccttctactttagccaggtcagacagacgaatttcggctgtaatcgctgctttacgagaagtgaagccgaatttcggcagacgacggtacagaggcatctgaccaccctcgaaaccgcgacgtacgccaccgccagaacgagacttctgacctttgtgaccacgaccaccggttttaccgaggccagaaccgataccacgacccaggcgtttacccgcctttttggagccttcggccggagacagagtatttaaacgcatctcttactcctcaactttaaccatgaaggaaaccgcgttgatcataccgcgaatagcaggagtatcctcgcgctctacggtgtgaccaatacgacgcagacccaggccaagcagcgttgccttgtgtttcggcagacgaccgattgcactgcgggtttgagtaattttaatagtctttgccatggtttatttccccagaatttcttcaacggatttaccacgcttggcagcgaccatttctggagaattcatattttccaggccatcaatagttgcacgaaccacgttgatcgggttggtggaaccataggctttagccagaacgttatgaaccccagcgacttccagaacggcgcgcattgcaccaccggcgatgataccggtaccttcggaagccggctgcatgaatacgcgagaacccgtgtgaacacctttaacagggtgttgcagagtgccgttattcagcgcgacgttaatcatattgcgacgggctttttccatcgctttctggatcgctgctggaacttcacgcgctttaccgtaaccaaaaccaacgcgaccgttaccatcgccaactacagtcagagctgtgaaggagaaaatacgaccacctttaacggttttagatacgcggtttaccgcgatcagcttttcctgcagttcgccagcttgtttttcgatgtgagccatcttacacctctaccttagaactgaaggccagcttcacgggcagcatctgccagtgcctggacacgaccatgatattggaacccggaacggtcaaaggatacatctttgatgcctttttccagagcgcgttcagcgacagctttacccacagctgcagccgcgtctttgttaccggtgtacttcagttgttcagcgatagctttttctacagtagaagcagctaccagaacttcagaaccgttcggtgcaattacctgtgcgtaaatgtgacgcggggtacgatgtaccaccaggcgagttgcgcccagctcctggagcttgcggcgtgcgcgggtcgcacgacggatacgagcagatttcttatccatagtgttaccttacttcttcttagcctctttggtacgcacgacttcgtcggcgtaacgaacacccttgcctttataaggctcaggacgacggtaggcgcgcagatccgctgcaacctggccgatcacctgcttatcagcgcctttcagcacgatttcagtctgagtcggacattcagcagtgatacccgcaggcagctgatggtcaacaggatgagagaaacccagagacaggttaatcacattgcctttaaccgctgcacggtaacctacaccaaccagctgcagcttcttagtgaagccttcggtaacaccgataaccatactgttcagcagggcacgcgcggtaccagcctgtgcccaaccgtctgcgtaaccatcacgcggaccgaaggtcagggtattatctgcatgtttaacttcaacagcatcgttgagagtacgagtcagctcgccgtttttacctttgatcgtaataacctgaccgttgatttttacgtcaacgccggcaggaacaacgaccggtgctttagcaacacgagacattttttcctccgattaggctacgtagcagataatttcgccaccaagaccagcctggcgcgctgcacgatcagtcataacacctttagaggtagaaacaactgcgatacccagacccgccataactttcggcagctcatctttacgtttatagatgcgcagacctgggcggctgacacgctgaatgctttctacaacagctttgccctggaaatacttcagagtaagttccagttcaggcttggtgtcgccttcaactttaaaatcttcaataaaaccttcttccttcagcacgttggcgattgccactttcagcttggaggaaggcatggtgaccgcagctttgttcgcggcctgaccgttacggatacgggtcagcatatccgcgatcggatcttgcatgctcatctgtctttactcccgtgattcaattggtgacaattaccagctagcctttttcagacccgggatttcaccgcgcatagcggcttcacggaccttaatacggctcaacccgaacttccgcaggaaaccatgcggacgacctgtttgacggcagcggttacgctgacgagacgggctggaatcacgcggcagagtctgcagcttgagaacagcgttccaacgatcttcgtcggaagcgttcacatcagagatgatcgctttcagttcagcgcgtttcgcgaagtatttatcagctaaagctacgcgttttacttcgcgtgctttcatactttgcttagccatttagtaaccctaccttacttgcggaacgggaagtcaaaggcagccagcagagcgcggccttcttcgtcagatttcgcagtagtggtaatggtaatatccaaaccacgaacgcggtcgactttatcgtagtcgatttctgggaagatgatctgctcacggacacccatgctgtagttaccacgaccgtcgaaagacttagcggacaggccacggaagtcacggatacgaggtacagcaatagtgatcaggcgctcaaagaactcccacatgcgttcgccacgcagagttactttacagccgatcggatagccctgacggattttgaagcctgcaacagatttgcgtgctttggtgatcagcggtttttgaccggagattgctgccaggtctgctgctgcgttatccagcagttttttgtcagcgatcgcttcaccaacacccatgttcagggtgatcttctcgacccgagggacttgcatgacagaattgtagttaaactcagtcatgagttttttaactacttcgtctttgtagtaatcatgcagtttcgccatcgtactactccaaattacttgatagtttcgctgttagacttgaagaaacggacttttttaccgtcttcgaatctaaagcctacacggtcagccttgccggttgccgcattgaagattgctacgttggaaacctgaatagcggcttctttttcaacgatgccacccggttggttcagggccggaaccggcttctgatgtttcttaaccaggttgataccttcaacaatgaccttgccggaagacaggacattcttaactttaccgcgtttacctttatctttaccggttaacacgataacttcgtcatcacgacggattttcgctgccatgattcgctccttagagtacttctggtgccagagagataattttcatgaacttctcactacgaagctcacgagttaccggcccaaaaatacgcgtaccgataggctgctcgctgttgttgttcagaagaacacaagcattaccatcgaagcgaatgacagaaccgtccgggcgacgaacacccttcttggtgcgcaccactaccgccttcagcacatcaccttttttgaccttaccacgcggaattgcttctttgatggtgatcttgatgatgtcgcctacgcctgcgtagcgacggtggctgccacccagaaccttgatacacattacgcgacgtgcaccggagttgtcggcgacgttcagcatagtctgttcttggatcattttagtgctccgctaatgtcaactactactgagacccgaaaatcaggtcgttaaaaatccccatatcgagggcgcggcattataacaccgcttcaaggatatgggtagaaaaaataaacggctcatttctgagccgtttattcgtattgagagagtgtactgtattacagaaccgctttctctacaacgcgaaccagcgtccaggatttagtcttggacagcggacggcattcgcggatttcaaccacgtcaccgataccgcattcgttgttctcgtcatgtacgtgcagtttggtcgtacgcttgatgaatttaccgtagatcgggtgtttcacaaaacgttcgatagcaacaacaatggatttctccattttgtcgctaacaacgcgaccttgcagagtacggattttatcggtcattacgcacccgccttctcgttcagtaaagtcttaacgcgtgcgacatcgcgacgcacttgcttcaacaggtgagactgttgcagctggccacttgcagcctgcatacgcaggttgaactgctcacgcagcaggttcagcagctcggtgttcagctcttcaacgctcttctcacgcagctcttttgctttcattacatcaccgtcttagttacaaaggtggttttaatcggcagtttcgctgctgccagcttgaatgcttcacgggccagctcttccggaacaccgtccatttcatacaggactttacccggctgaatcaaggcaacccaatactccacgttacctttacctttacccatacgcactgccagcggcttttcagtgatcggtttgtccgggaacacacggatccagatcttaccttgacgcttaactgcacgggtcatagcacgacgtgctgcttcgatctgacgggcagtcagacgaccacggccaacagctttcagaccgaagctgccgaagctaacatccgtaccctgcgccagaccgcggttacggcctttgtgcattttacggaattttgtacgctttggttgtaacatcagcgacgctccttatttacggcctttacgctgctgctttttaggctgagcagccggtttttccggttgttcaacagcagccataccacccaggatctcgcctttgaagatccacactttaacgccgattacaccgtaagtggtgtgcgcttcagaggtgttgtagtcgatgtcagcacgcagagtgtgcagcggtacgcgaccttcgcggtaccattcggtacgtgcgatttccgcgccgcccagacggccgctaacttcaactttaatacctttagcgcccagacgcattgcgttctgtacagcacgcttcatagcacgacggaacataacgcgacgttccagctgagaagtgatgctgtcagcaaccagttttgcgtccagttcaggcttacgaacttcggcgatgttgatctgtgcaggaacgccagcgatgtccgctacgaccttacgcagtttttctacgtcttcaccttttttaccgataacgatacccgggcgagcagtgtgaatggttacacggatgctcttagccggacgctcgataacgatacgagatacggacgctttagccagttccttagtcaggtactgacgtactttaaaatcgctgtccaggttgtcagcgaattctttggtgttcgcaaaccaggtagagttccatggttttacaatacccaggcgaataccattaggatgtactttctgacccattgctagtctccagagtctcagcgatcggacacaaccacagtgatgtggctggtgcgcttcaggatgcgatctgcacgaccttttgcacgcggcataatgcgcttcatgctcgggccttcgtctacgaaaattttcgtaactttcagatcgtcaatgtcagcgccatcgttgtgttcagcgttagcaatggcagattccagaactttcttgaccagtacagccgctttcttgttggtgtaggtcaaaatatccagagcctggctcactttcttaccgcgaatcaggtcagcaacaaggcgaaccttctgagcagaagaacgagcatggcgatgtttagcgatagtttccatctcttcctcctaccttatttcttcttcgcttttttatcagcagcgtggccgcgataagtacgagtcggtgcgaattcacccagtttgtgaccaaccatttcgtcggttacaaataccggaacgtgctgacgaccattatggacagcgatggtcaaaccgatcatgttaggaaagatcgtactacgacgggaccaagtgcgcaggggcttcttgtctccgctttccaccgctttctctaccttcttcagcaagtgcaggtcaataaaaggacctttcttgagagaacgtggcatggcttatcctctaaaattatttgctacggcgacgtacgatgaatttatcagtacgcttgttgctgcgggtcttcttacctttggtctgaacgccccacggagttaccgggtgcttaccaaagttacgaccttcaccaccaccatgtgggtggtctaccgggttcatcgcggtaccgcgaacggtcggacgaacaccacgccagcgtgcagcacctgctttacccagaacgcgcagcatatgctcagcattgccaacttcgcccagagttgcacggcagtctgcttctactttacgcatttcaccagaacgcagacgcagggtgacataagcaccatcacgagcaacgatctgaacgtaagtaccagcggaacgtgccagctgaccgcctttacctggtttcatttctacgttatgaacagtagaaccaaccgggatgttgcgcatcggcagggtgttacctggtttgattgcagcatcaacgccagactgaatctggtcgccagctttcaggcctttaggggccaggatgtaacggcgttcaccgtctttgtacagaaccagcgcgatgttcgcggaacggttcggatcgtactcaagacgttcaacaactgccgggataccgtctttgttgcgtttgaagtcaacaatacggtaagcctgcttgtggccaccaccgatatgacgagtggtgatacggccattgttgttacgaccaccggatttgctgtttttttccagcaacggagcaaaaggtttgcccttgtgcagctcagggttaaccactttaactacgtggcgacgacccggagatgtcggtttacatttaacaactgccattgtattactcctccgacttactcagcgccgccaacgaagtccagattctggccttctttcagggtgacgtaagcttttttccagtcgctacgacgaccgatacgctgtccgtgacgtttaactttccctttaactaccagggtgttaacgacttcgacttcgacttcaaacagtttctgcacagcagctttgatttctgctttggtcgcgtctttagcaactttgagtacgatggtgttggatttttccatcgcagtagacgctttttcagaaacgtgcggtgcacgcagcaccttcagcagacgttcttcacgaatcatgccagcatctcctcaacttgcttaacagcatcagcagtcattacgactttgtcgaaggcgatcaggctaaccgggtcgataccagttgcatcgcgtacgtcaaccttgtgcaggttgcgcgcagccaggaacaggttttcgtccagctcaccggtgatgatcagcacatcttccagagccatgtctttcagtttctgtgccagcagcttagttttcggcgcttctacagagaacttctcgacaacgatcagacgatcctgacgtaccagttcggacaggatgcttttcagcgcgccgcggtacatcttcttgttaactttttgactgtggtcctgcggacgagcagcaaaggtcacgccaccagaacgccagatcgggctcttgatagaaccagaacgcgcacggccggtgcctttctggcgccacggttttttaccggaaccagttacttcagcacgagtcttctgagcacgagtaccctgacgagcaccagctgcataagcaacaacaacctggtgaaccagcgcttcgttgaaatcacgaccgaaggtagtttcggaaacagtcagcgcgctctgcgcgtctttcaatactaattccattgctatctccttacgccttcacagctggtttaacgatcaggtcgctaccggttgcacccgggacagcacctttaaccagcagcaggttgcgctcagcgtcaacgcgtactacgtcaaggctctgaacggttacacgttcgttacccatctgacctgccattttcttgcctttgaacactttgcccggagtctggttctgaccgatagaacccggaacgcggtgagacaaggagttaccgtgagtagcgtcctgggtacggaagttccagcgcttaacggtacctgcgaaacctttacctttagaggtgccagttacgtcaacttttttaacgtcagcaaacagttcaacgctaatgctctgacctacagtgaactcttcgccttcagccaggcggaattcccacagaccacggccagcttctacgccagctttagcgaagtggccagcttcaggcttggtcacacggttagcttttttagcaccggtggtcacctgaatagcacggtagccatcgttagccaggtctttaacctgagtaacgcggtttgcttcaacttcgattacggttactgggatagaaacgccgtcttctgtgaagatacgggtcatacccacttttttaccgactaaaccaatcattgtttcaacctctcaatcgctcaatgacctgattaacccaggctgatctgcacgtctacaccggcagccagatccagacgcatcagagcatcaacggttttctcggttggctcaacgatgtcaaccagacgcaagtgagtacggatttcgtactgatcgcgcgcgtctttgttgacgtgcggggagatcagaacagtgaagcgctctttgcgtgtcggcagcgggatcggaccacggacctgcgcaccagtgcgcttggcagtctcgacgatttccgcggttgcttgatcgatcagacgatgatcaaacgctttcaggcggatacggattctttggttctgcatgagaccagagctccaattattttataaacgaaaatgattactcctcagacccattacgattgatgggagagtgtaaccgttcttacgtagctccccgattgggagcattgttaggtagccaaattcggctaactgaggttcagattgaacctgctgtcaactacgacaagcccgcgcattatacatacttaaccaccgaacgcaagcgtattgctagtaaagtaaacagccttcgggttatctctcaagttcgttcagtgcatttttgacacgctctcttaaaccggctttctcttcgctttcttccacagtattttcttcgtcttcagaagaagagggggcattctcaaccgcgacgcctgggtcatcttcctcctcgacggattcgacgacggggagtggctgttttttgaagaaatagtgttgtgtactttgtttaaaagcgggcgtttcagcctctacagtgacttcggcttttactatccaaagcacccatagctgcctggcatacccaccaaccagcaccattcctgcaaaccacaggcaaatcagtaataaacaaattacatatattatggtgctgtgtttttgtcgggagaagataccagggtgacctgtttctttctgctcacgcgcggcgatatagaattcaaacattataatcccttgtgacgtaaaaactgcaaaacaaaagtcctacgcaggaattatttacgttttacgagaacccttcaatatgaattaaattacggcattaaaaataagaaaaaagcctgacaaatgaagcattttaaaaacagaaacattcatatttaaaatgttaaattgaattgatattttaaatatgaataatttattcgttctgacagtacgaataagatatgccgtcaacaaatgcaaaaagggcgccgaagcgcccttttcaattcaaaactaattaacgtgtaattagcccagaactttagcaacaacgcccgcgccaacggtacggccgccttcacggattgcgaaacgcagaccgtcgtccatcgcgatcgggtggatcagggtaacaaccattttgatgttgtcgcccggcattaccatctctacgccttccggcagttcgatggtaccagtcacgtcagtagtacggaagtagaactgcggacggtagcctttgaagaacggagtatgacggccgccttcatctttggacagaatgtacacttcagattcgaacttggtgtgcggcttgatggtgcccggcttagccagtacctgaccacgttcgatttcttcacgtttgataccacgcagcagaacacctacgttctcaccagcacggccttcgtccagcagtttgcggaacatttcaacgccagtacaggtagacttctgagtctctttgataccaacgatttcaacttcttcaccaactttgatgataccgcgttctacacgaccggtaacaacggtaccacgaccggagatggagaatacgtcttcgatcggcagcaggaacggcttgtcaatcgcacgctctggttccggaatataagaatccaggaagccagccagttccaggattttcgcttcccactctgcgtcgccttccagcgctttcagagcagaaccacgaacgatcggagtgtcgtcgcccgggaagtcgtactgagacagaagttcacgaacttccatttcaaccagttccagcagctcttcgtcatcaaccatgtcgcatttgttcaggaacacgatgatgtacggaacgcctacctgacgacccagcaggatgtgctcacgagtctgcggcatcgggccgtcagtcgcagcaactaccaggatcgcgccgtccatctgagcagcaccggtgatcatgtttttaacatagtcggcgtgccccgggcagtctacgtgtgcgtagtgacgggtcggggtgtcgtattcaacgtgagaagtgttgatggtgataccacgagctttttcttccggcgcgttatcgatctggtcgaatgcacgagcagcaccgccgtaggttttagccagtacggtggtgattgcagcggtcagagtagttttaccgtggtcaacgtggccgatagtaccaacgttaacgtgcggttttgtacgttcaaatttttctttagacacggctatattccttactatagtgctctccccttcaggagagagcacgggactttggtattaacccttaggcttatttaccacgggcttcaattacggcctgagcaacgttactcggcgcttcatcatacttcaggaattccatagtgtaacttgcacgacctttggtcagagaacgcagctgagttgcgtatccgaacatttcagacagcggtacttcagcgtggatcttaacgccagtaacttcagattcctgacctttgagcataccacgacgacggctcaagtcaccgataacgtcaccggtgttctcttccggagtttctacttcaaccttcatgatcggctcaagcagaactggtttcgctttcttaaagccttctttaaaggcgatagaagcagccagtttaaacgccagttcagaggagtcaacgtcatggtaagaaccgaagtgcagacgaatacccatgtctactaccgggtagcctgccagcggacctgctttcagctgttcctggatacctttatcaacggccgggatgtattcgccagggattacaccacctttaatgtcgttgatgaactcgtagcctttcgggttactacccggctccagcgggtacatgtcgataacaacatgaccatactgaccacgaccaccagactgtttcgcgtgtttaccttcaacatcggtaactttctggcggatagtttcacggtaagcaacctgcggtttacctacgttcgcttcaacgttgaattcacgcttcatacggtcaacgatgatgtcgaggtgcagttcgcccatacccgcgatgatggtctggttagattcttcgtcagtccatacacggaaagacgggtcttctttagccagacggcccagagccagacccattttttcctggtcagctttggttttcggttcaactgcgatggagattaccggctcagggaattccatacgttccagaatgatcggcgcatccgggtcacacagggtgtcaccagtggttacgtctttcagaccgatagcagcagcgatgtcgcccgcgcgaacttctttgatctcttcacgtttgttagcgtgcatctgaacgatacgaccgaaacgctcacgtgcagctttcacggagttcagtacggtatcaccagagttaaccacaccggagtaaacacggaagaaggtcaggttaccaacaaacgggtcggtagcgattttgaacgccagtgcagagaacggctcgtcatcacttgcgtgacgttcagccggagtgtctttaccgtcgtccaggataccgttgatcgcaggtacgtcaaccggggatggcaggtaatcaattaccgcatccagcatcgcctgaacacctttgttcttgaacgcagaaccacaggttaccaggatgatttcgttgttcagaacgcgctgacgcagagcacctttgatttctgcttcagtcagttcttcaccacccaggtatttttccatcagctcttcagaagcttcagctgcggattcgatcaggttctggtgccattcgttagccagttcaaccatgtctgccgggatatcttcgtattcgaaggttacgccctggtcagcgtcgttccagttgatagctttcattttcaccaggtcaacaacaccggtgaaatgttcttcagcaccaatcgccagctgcagcggaaccgggttcgcgcccagacgggttttgatctggttaacaactttcaggaagttcgcacccatgcggtccattttgttaacgaacgcaatgcgcggaactttatatttgtttgcctgacgccatacggtttcagactgcggctgaacaccaccaactgcgcagtaaaccattaccgcaccatcgagaacacgcatggaacgttctacttcgattgtgaagtcaacgtgccccggggtgtcgatgatgttgatgcgatgcggctcatactgcttagccataccagaccagaatgcagtagtcgcagcggaagtgatggtaataccacgttcctgctcctgctccatccagtccatggttgcagcgccgtcatgaacttcaccgattttatggtttacaccggtgtagaacagaatacgttcggtagtagtggttttaccggcgtcgatgtgcgcactgataccgatgttacggtagcgtgcgatgggtgttgtacgagccatttgtttcctcgtttatcttttaggcgttcaatttaagtagcccaaagcgggctgcttactggaagcgcccgcctggtgactaaaactccgaagggataaccaacggtagtgtgcgaacgccttgttggcttcggccatacggtgaacgtcttcacgtttcttaactgcagtacctttgttttctgcagcatcagaaagttcgttcgccaggcgcagagccatggatttatcaccgcgtttacgagcagcttcaacgatccaacgcattgccagagcattacgacgaaccggacggacttcaactggtacctgataagtagaaccaccaacgcggcgagacttaacttctacagtcgggcgcacgttttcgagagctacttcgaatgcttccagttcagatttaccagagcgctgagccagggtctccagcgcgctgtatacgatagattcagcagtagattttttaccatctaccatcaggatatttacaaatttagccagcagttcacttccgaacttcggatccggcagaattttacgctgaccaatgacgcgacgacgtggcatggaaatactccgttgttaattcaggattgtccaaaactctacgagtttagtttgacatttaagttaaaacgtttggccttacttaacggagaaccattaagccttaggacgcttcacgccatacttggaacgagcctgcttacggtctttaacgccggagcagtcaagcgcaccacgtacggtgtggtaacgaacacccgggaggtctttaacacgaccgccacggatcaggatcacggagtgctcctgcaggttgtgaccttcaccaccgatgtaggaagtcacttcgaaaccgttagtcagacgaacacggcatactttacgcagcgcggagttcggtttacgaggagtggtagtatatacacgagtacatacgccacgtttttgcgggcatgcttccagcgcaggcacgttgcttttcgcaactttgcgagcacgtggtttgcgtaccagctggttaactgttgccattaaatagctcctggttttagcttttgcttcgtaaacacgtaataaaacgtcctcacacaatatgaggacgccgaattttagggcgatgccgaaaaggtgtcaagaaatatacaacgatcccgccatcaccaggccatctggctggggtgcttaaccgtaagtctgacgaaatcagtatagtcaatgagaatgatgtcgttgctaatttgaccagtcaaaccgcgggcaataaggtcttcgttcagggcatagaccttaatgggggcattacgcagactttcaaggtagcggttaccgtcaactgcggcagttacgccatcttgcaataatagcagttcgtctccttcactgagcagacgcagcagcgcagcaaaatccgtcagccagggactgcgatgtaatgtgtgcagcataaacgcctcaaaacctcaaaataacatcgtagttggcgagttcgcggcgtaaggcatctgcttcgagcggcgtggcttcgacaacaaagggtgtctgcggatctaacccgcgttcgcgcagactagccgcacaaacccagcactgttcaatgtcgtacagacccaacaatttaaaagtggcaatgtaatcacgcgccagcactgcatcgggcttttgtcctggcagcagctgaaaaacgccatcagctataaagaagacagccagatcgtcagttaatgcggaagttgccagtaaagcatctaaaccttcccggcctgcggctgtaccatgaggtgcagtagaaaaaacaaacgcaattcgtttcatcagaactgtaccaccctgtcacaggtcaggctggcttccgccagcgccccaagtccgcttaaggtaaatccctgctgaaggttactgctagccagccccagtcttccggcctccgtttcatcaacaacgccacggcgtaatgctgccgctacgcagatattcagcgccacaccatgttgcgcattcagttgttgccaggcccgtacgaggtcaaattcgtcacttgccggagaggtcaattggttagcgttatagaccccttcccgatagaaaaagacgctgcttaactcatggccatctgctatcagcgcctgcgcaaactgaaaagcactactcgcctgttgcgtaccgtatgctggcccggtcaccacgatggcaaaacgcattacttatcttgcccctggaaatcaccgctcttgaactggcggatgtagagatagacagtgtgtttggagatgttcaggcggtcagcaacctggttgatcgcatctttaatatcgaagatccctttctcgtagagattcagcacgatctgacgatttttggcgttattagaaacattgcgatcggcattcacttcttcgatggtgaactccagcgtttgggtaaccagatcttcaacagaagaggcaaagttgacgctactaccgacatccggggtttctggcggcacaaaggtgctcataatctggctgaagggaacatcaagattcatattgatgcacagcagaccaattacacgctgttcgcggttacgaatcgcgatagtcagggacttcattaatacgccgcttttggcgcgagtaaagtagcatttagaaacgctgctatccgctcccgtcatatcgtgcagcatacgtagcgccaggtcagtaattgggctaccaatcttccggcctgtatgttcaccgttagcaatgcgaatggcactacattttagatcctgcaaagagtgcaaaacgatttcacagtgggagccaataagcatcgctaacccgtccaccaccgcttcgtaggatttcagaatatcaaaatcggtctggtcgaaaggacgttgatccagtaaatccaactcactggtttcgttggttaaaaggctcctggacatgaaaaaaaacactccttttcaggagcctgtcgttaacttttcagggcaggctcattaatgatgcgggtaactaaattaatacagcggaggttccgctttccagcactaattatatccggcctgtaataaaaaaaccgccgcctggtcaggcggcggttcttaatgcttattttttagcagaatctgcggctttcgcatcagcttccggctttgcatcagccttcggcgctggtttcacatccagcagctctacgtcaaacaccagggtagaattcggtgggatccccggaacacccgctttgccgtaagccagttctggtggaataaccagtttgatcttaccgcctttcttgatgttcttcagaccttctgtccaacccgggataacaccgtccagacggaaagaaagcggttcaccacgggtgtaagagttgtcgaactctttaccgtcgatcagcgtacctttgtagttcactacaacagtatcgctgtctttcggtgcttcgcctttaccggcttctactacctgataaaccagaccagtactagaggttttcacacctttctctttggcaaatttctcgcggtactctttaccttttgcttcgttatcagccgcgtctttttccatcttcgcctgagcagaagacttcacgcgagcttcgaatgcttgtagagtctgttcgatctcttggtcggagagtttgcttttatcagcaaatgcatcctgaacaccagcgatcagctgatctttatccagtttgatgcccagtttttcttgttcttttagagagttttccatgtaacgacccaggctggcacccagtgcataagcacttttctgatcgtcatttttgaacgctgctttgctgtcagcagctgtagcaggttttgcagcttcagcagcaaaagtgattggtgcatgcagggcaacggccattgtggtcgccagcagcgttactttaaacagacttttcatccatatctccaggatcggggcatctcaccccagggttaactattatcagaagggtactataaagcgttgtcgaacaaatctacatacagacacgccctattatcatctattttcagactctttttgtttaaattagtttcgatgaccgcgaaatgagtgctgtctcgggcagcaaagttaagtagaatccgcggcgaccattcgacaaaagaggtgaatcatgcaggatttaagtttggaagcacgcctggcagagctggagagccgactggcttttcaggaaatcaccattgaagaactgaacgtcacggtgaccgctcatgaaatggagatggcgaaactgcgcgatcatctgcgtctgctgaccgagaagttaaaagccagccagccgagcaacatcgcgagccaggctgaagaaacgccaccgccacattattgaggcgtaaaaaaagcggggattccccgcttttttgtcactttttcggtattagtggcaaccgcaaccgccgttgcctttaccgccacagcagccttcgccaccgtgttcatgaccgtgatcgtggccatgaccgccgcagcaaccgtcgtggtcgtgatcgtggtggtgatcgtgcgcgccgtgaacgtgaccatgagccagttcttcttcagtcgcttcgcgaatcgccacaacttcaacgttgaatttcaggttctgaccggccagcatgtggttaccatcaaccacgacgtgatcgtcttcaaccgcagtgatttcaaccggtaccggaccctggtcggtttcagccaggaaacgcatacctacctgcagttcatcaacgcccataaatacgtctttaggaacacgttgcaccaggttttcgtcgtactgaccgtaagcgtcgttcgcgccaacagcgacatcaaatttgtcgccaacttcatgaccttccagcgccgtttccaggccagagatcagggaaccgtgaccatgcaggtagtccagcggcgcactcaccggagactcatcaaccaacacaccgtcttctgtacgtacctgataggccaggctgaccaccaggtcttttgctactttcatgatatctcctgagcatgggaagaatagtggcgcagattgtagcggaattctgcagccgtgtactcactagcttaaaaaaactcggcgcatatcgttagtccggatgaaaaatcccgatcacttgctcatctttgcgaacgtgatcgcgggcttctttgtctgcttctcgcatctgatgtccgcacttaacacattcaacaatatcaatattattttcgcgccacatcgccatactatcctgcgcctgacaggccgggcattttgcgcccgcaataaaacgttttcggattgccatctttaccctttactcaaattcatcccagccgtccagctggcgtcgttcttgttgcatttcacgctggaaaatctcttccagttcgcgtcgggcttccctggcgcgagaaatttgtacggtatcggcatgcattgggatgagctctcgcagcatccgcatatccaggcggcgaaaatgcagttgcgctcgctgtgcctgatgcggatgcatgccaagcgtgaccagcgtcttgcgccccagctctaacgcactggagaatgtttcacgggaaaactgcgtcacccctgcctgtaataactcatgcgcttccacacgtccgcgcgctcgcgcaagaatatgcaaatgcggaaagtgctgttggcatatttccaccagcttcatggtgtcttccggctcgttacaggtaatgacgatagactcagcggcctctgcacccgcagaacgtaaaagatcgacctgcgtggcgtcgccgtaataaactttgtagccgtatttacgcatcaggttaacggcgctgatatcccgctccagcacggtaatgcgcattttatttgccatcagcaaacgaccaatcacctgaccaaaacgcccgaagcccacgacaatgacctggggtttatcatcgttgacccacggtttttcgtcttcttcttccggtccgttaaactggcgggatagccatttatccaccagcttcatcagcaacggcgtggtcatcatggaaagcgtcaccgtcaccagcaacaacgccatctggtcgccctggaataagcgttgactagaagcggtagaaaagaggacaaaggcaaactcaccactctgactcaacacgccagcaaactgcatccgctcactgctacgcacgccatacaatcgcgccagcagatacagcacgagaattttcaccgccaccagcacaaccacgcttatcactacccacaacagatgggtataaagcaccccgaggttgagactcatgccgacagagataaagaacaaaccgagcagcaagcctttgaagggatcgatagccgtttccagttcatggcgatattcactttccgccagcagcacgcccgcaataaatgtaccgagcgccatgctcagccccagcgcatccataaacaatgcggaacccaacaccagcagcagcgtcgcggcggtgaacacttcccgcacgccagaagctgcaataaagcggaataccggacgcagtaaatagcgcccaccaatcagcatgccgacaaacgccagcaccttcatgccgaccttcatccagtcgaaatgttcgtctgcgctccccgccaacaacggcactaacgccagtgctgggattactgccagatcctgaaacagcagaacgctaaacccgagctggccggattcgctgcgattcatccctttctcacgcatcaattgcaacgccattgcagtactagacatcgcaaggccaatgccaccgaccaccgccgcctgccaggcgaaatccgtcagcatcaataatcccgccagcaacgccgcgcttaacagcacctgtgccgcgcctacgccaaaaatgctacgccgcagttgccaaagtttggagggattcaactcaaggccgatgataaacatcaggaataccacgccgagttcgctaaagtggaggatctcatcgacgtcgctaataaaccccagcccccacgggccaattgcaatccctgccagcaaatatcccaacacagcgccaatacccagccggcttgccagcggcaccgcagccaccgccgcgaagagaaacagcactcctgcgagtaaaaaatcggaaccttccatcagcggcctcctggagacagcggatttgccagccagtcaccgtaggctctggcgtggctcgccagctcctgtgcgctttgccgtctcgcccagtaaataatgatgggacttaaccaatgcatccggcacatgcccgccgccagttcaaaggggcgcagcacatcgctcatcgggtagcgattcagcgcgtcataacggtaagcactttccggctcgccggtggtaatcacgctacgccagtactttcccgccagttggtttcctcccggcccgctggcaaaaccacgacttaatacccggtccagccactctttcagtagcgccgggcagctataggtataaagaggatgctgaaagacaatcacctcgtgctcgcgcagtaatgcctgctcacgggggatatcaataaaaaaatcgggatagtgcgcgtaaaggtcgtgcacggtaacattgctgagctgcgtggccggtttaagcagtacccggtttgccacgctgtcctgagattccggatgggcatacagcagcaaaactttcgctggctgagacatcatccccctcccggtatggtttttgtgtatagtcgctgttttgggctaccattgcgcccggtgcggcagctcgcccatacattacattatcataatgataagttaacatagtctgaacatacggcaccttatgattgttttctccagcttacaaattcgtcgcggcgtgcgcgtcctgctggataatgccaccgccaccatcaaccctgggcagaaagtcggcctggtgggtaaaaacggctgtggtaaatctaccctgctggcattgctgaaaaatgaaatcagcgccgacggcggcagctacacctttccgggaagctggcaactggcgtgggtgaatcaggaaacgccggcgttaccgcaagcggcgctggaatatgtcattgacggcgaccgtgaatatcgtcaactagaagcgcagctacacgacgccaacgaacgtaacgacgggcacgccattgcgaccattcatggcaagctggatgctattgacgcatggagtattcgctcccgtgctgccagcctgctgcacggcctcggtttcagcaatgaacaactggagcgcccggtaagtgatttttccgggggctggcgtatgcgtcttaaccttgcccaggcgctgatttgccgtagtgacttgctgctgctcgacgaaccgactaaccacctcgatctcgatgccgttatctggctggaaaaatggctgaagagctatcagggcacgctgatcctgatctctcacgaccgcgacttcctcgatccgatcgtcgataaaattattcatatcgaacaacaaagcatgttcgagtacaccggcaactacagtagctttgaagtacagcgcgccacccgtctggcgcagcaacaagcgatgtacgaaagccagcaggaacgcgtagcgcatctgcaaagttatatcgaccgtttccgtgccaaagccaccaaagcgaagcaggcccagagccgcattaagatgctcgagcgtatggagctaattgcccccgcgcacgtcgacaacccgttccgctttagcttccgcgcgccggaaagcctgccaaatccgttactgaagatggaaaaagtcagcgcgggctatggcgatcgcattattctcgacagcattaaactgaacctggtgcccggcagccgtattggtctgttaggccgcaatggcgcgggtaaaagcacattaatcaaactgttagccggtgaacttgcgccagtcagcggtgaaattggtctggcgaaagggatcaaactcggctacttcgcccagcatcaacttgaatacctgcgcgccgacgaaagtcctattcaacatctggcacgtttagcgccgcaggagctggaacaaaaactgcgtgactacctcggcggctttggtttccagggcgataaagtaaccgaagaaacgcgccgcttctccggtggggaaaaagcccgcctggtgctggcattaattgtctggcagcggccgaatctgctgctgctcgacgaaccgactaaccaccttgacctcgacatgcgtcaggcactcaccgaagcattaatcgagtttgaaggcgcgctggttgtcgttagccacgaccgtcatttgctgcgttccaccactgacgatctctacctggttcacgatcgtaaagtcgaaccgttcgacggcgatctggaagattatcaacagtggttgagcgacgtacaaaagcaggaaaaccagaccgacgaagcgccaaaagagaatgcgaacagcgcccaggcacgtaaagatcagaagcgtcgggaagctgagctgcgtgcgcaaacccagccactgcgtaaagagattgcccgtctggaaaaagagatggagaagctgaacgcgcaactggcgcaggcggaagagaaactcggcgacagcgaactgtatgaccagagccgtaaagcggagttgaccgcctgcctgcaacagcaagccagcgccaaatccggcctggaagagtgcgaaatggcatggctggaagcccaggagcagcttgagcagatgctgctggaaggccaaagcaactgatggcgcagataacgacgaccgatgccaatgaattcagcagcagtgctgaattcatccccatgcgcggctttagcaattgtcatctgcaaaccatgctgccgcgtctgtttcgtcgtcaggtgaaattcaccccgtactggcagcggctggagttgcccgacggcgattttgtcgatcttgcgtggagtgaaaaccctgcacaggcgcaacataaacctcgtctggtggtgtttcacgggctggaaggcagtctcaacagcccttacgcccacggtctggttgaggcggcgcaaaagcgcggctggctgggcgtggtgatgcattttcgcggatgcagcggtgaaccaaaccgtatgcaccgcatttaccatagcggcgaaaccgaagacgccagttggtttttacgctggctgcaacgcgaatttggtcatgcgccaacggctgccgtcggctatagcctcggcggtaatatgctggcctgtttgctggcaaaggaaggcaatgatctcccggttgatgcggcggtgattgtctctgcgccgtttatgctggaagcctgtagctatcatatggaaaagggcttttcccgcgtttatcagcgttacttgctgaacctgttaaaagccaatgccgcgcgcaagctggcagcctaccccggaacgctgccgattaatctcgcgcagttaaaaagcgtacgtcgcatccgtgaatttgacgatctcatcaccgccagaattcacggctacgccgacgctatcgactattatcgtcagtgtagcgccatgccgatgctgaaccggatcgccaaaccgacgctgattattcacgccaaagacgatccgtttatggatcatcaggtgatcccgaaaccggaaagtctccccccgcaggtggagtatcaactgactgaacatggcggtcatgttggctttattggcggtacattacttcatccgcaaatgtggctggagagtcgcattcctgactggttaacaacgtatctggaggcgaaaagttgttgatattaacgtatctggaggcgaaatcatgttgattccgtggcaagacctctcccccgaaacgctggaaaatttaattgaaagctttgtgttacgtgaaggcaccgattatggtgaacatgagcgtacacttgaacagaaagtcgccgacgtcaaacgccagctacagtgcggagaagcggtgctggtatggagcgagctgcacgaaacggtcaatattatgccgcgcagtcagtttcgcgaataacctgcaaccgtcggcggacgagataataatgatagctaagtcatggagttactatgtctgccaaacatccggtcattgcggtaacaggatccagcggcgcggggaccaccaccaccagcctcgcgtttcgtaaaatattcgcgcagttaaatctgcatgcagctgaggtggaaggcgacagttttcaccgttacacccgcccggaaatggacatggcgatccgcaaagcgcgcgacgccgggcggcatatcagctacttcggccccgaggctaacgacttcggcctgctggaacaaaccttcattgaatacggtcagagcggcaaagggaaatctcgcaaatatctgcatacctacgacgaagccgtaccgtggaatcaggtaccggggacattcaccccctggcaacctttaccggaacccactgatgtactgttttatgaaggtttacacggcggcgtagtcacgccacagcataacgttgcgcagcatgtggacttactggtcggcgtggtgcctatcgttaaccttgagtggattcaaaaactgatccgcgacaccagcgagcgcgggcacagtcgagaagcagtgatggacagtgtagtgcgtagtatggaagactatatcaactacatcacaccgcagttttcccgcacccatcttaacttccagcgcgttcccaccgtcgacactagtaacccgttcgcggcaaaaggtatcccgagcctcgatgaaagctttgtggtgatccattttcgtaatctggaagggatcgatttcccctggctgctggcgatgttgcaaggcagtttcatttcccacatcaatacgttagtggtaccgggcggcaaaatgggtctggcaatggaattaattatgctgccgctggtgcaacgattgatggaaggaaagaaaatcgagtaactctgctattacgccggataaaatactatccggcttcacaacgggatagttaagtcacgcggcaaccacttcatagctgtgagtaatattcaccgctttttccagcatcaacgccacactacaatatttctcggcagagagatcaaccgcacgcgcaaccgctgcgtctttcaggtcgcgaccggtgacgataaaatgcagattaatgtgcgtaaacaggcgtggtgcctcttcgcggcgttcagaggtcaattttacttcacaatcgaccacatcctgacgccctttttgcaggatgctaaccacatcgatggcactgcaaccacccgccgccatcaacaccatttccatcggacttggtgctttatcgccactgttgccgtccattaaaatctgatgaccagaggcggattcgcccagaaaagttaacccttcgacccacttcactcgcgcttgcatttttgctactccactgcgtcaattttcctgacagagtacgcgtactaaccaaatcgcgcaacggaaggcgacctgggtcatgctgaagcgagacaccaggagacacaaagcgaaagctatgctaaaacagtcaggatgctacagtaatacattgatgtactgcatgtatgcaaaggacgtcacattaccgtgcagtacagttgatagccccttcccaggtagcgggaagcatatttcggcaatccagagacagcggcgttatctggctctggagaaagcttataacagaggataaccgcgcatggtgcttggcaaaccgcaaacagacccgactctcgaatggttcttgtctcattgccacattcataagtacccatccaagagcacgcttattcaccagggtgaaaaagcggaaacgctgtactacatcgttaaaggctctgtggcagtgctgatcaaagacgaagagggtaaagaaatgatcctctcctatctgaatcagggtgattttattggcgaactgggcctgtttgaagagggccaggaacgtagcgcatgggtacgtgcgaaaaccgcctgtgaagtggctgaaattagctacaaaaaatttcgccaattgattcaggtaaacccggacattctgatgcgtttgtctgcacagatggcgcgtcgtctgcaagtcactagtgagaaagtgggcaacctggcgttcctcgacgtgacgggccgcattgcacagactctgctgaatctggcaaaacaaccagacgctatgactcacccggacggtatgcaaatcaaaattacccgtcaggaaattggtcagattgtcggctgttctcgtgaaaccgtgggacgcattctgaagatgctggaagatcagaacctgatctccgcacacggtaaaaccatcgtcgtttacggcactcgttaatcccgtcggagtggcgcgttacctggtagcgcgccattttgtttcccccgatgtggcgcagactgatttatcaccccgatatcaactatgcacttcgacaaacgctggtgctatgtttgcccgtggccgttgggttaatgcttggcgaattacgattcggtctgctcttctccctcgttcctgcctgttgcaatattgcgggccttgatacgcctcataaacgttttttcaaacgcttaatcattggtgcgagcctgtttgccacctgtagcttgctgacacagctactactggcaaaagatgttcccctgccctttttgctgaccggattaacgctggtacttggcgtcactgctgagctggggccattgcacgcaaaattgcttcctgcaagcctgctcgccgccatttttaccctcagtttggcgggatacatgccggtctgggaaccgttgctcatctatgcgttgggcactctctggtacggattgtttaactggttttggttctggatctggcgcgaacaaccgctgcgcgagagtctaagtctgctgtaccgtgaactggcagattattgtgaagccaaatacagcctgcttacccagcacaccgaccctgaaaaagcgctgccgccgctgctggtgcgccagcaaaaagcggtcgatctaattacccagtgctatcagcaaatgcatatgctttccgcgcaaaataatactgactacaagcggatgctgcgtattttccaggaggcgctggatttacaggaacatattagcgtcagtttgcatcagccggaagaggtgcaaaagctggtcgagcgtagccatgcggaagaagttatccgctggaatgcgcaaaccgtcgccgctcgcctgcgcgtgctggctgatgacattctttaccatcgcctgccaacgcgttttacgatggaaaagcaaattggcgcactggaaaaaatcgcccgccagcatccggataatccggttgggcaattctgctactggcatttcagccgcatcgcccgcgtgctgcgcacccaaaaaccgctctatgcccgtgacttactggccgataaacagcggcgaatgccattacttccggcgctgaaaagttatctgagtctaaagtctccggcgctacgcaatgccggacgactcagtgtgatgttaagcgttgccagcctgatgggcaccgcgctgcatctgccgaagagctactggatcctgatgacggtattgctggtgacacaaaatggctatggcgcaacccgtctgaggattgtgaatcgctccgtgggaaccgtggtcgggttaatcattgcgggcgtggcgctgcactttaaaattcccgaaggttacaccctgacgttgatgctgattaccaccctcgccagctacctgatattgcgcaaaaactacggctgggcgacggtcggttttactattaccgcagtgtataccctgcaactattgtggttgaacggcgagcaatacatccttccgcgtcttatcgataccattattggttgtttaattgctttcggcggtactgtctggctgtggccgcagtggcagagcgggttattgcgtaaaaacgcccatgatgctttagaagcctatcaggaagcgattcgcttgattcttagcgaggatccgcaacctacgccactggcctggcagcgaatgcgggtaaatcaggcacataacactctgtataacagtttgaatcaggcgatgcaggaaccggcgtttaacagccattatctggcagatatgaaactgtgggtaacgcacagccagtttattgttgagcatattaatgccatgaccacgctggcgcgggaacaccgggcattgccacctgaactggcacaagagtatttacagtcttgtgaaatcgccattcagcgttgtcagcagcgactggagtatgacgaaccgggtagttctggcgatgccaatatcatggatgcgccggagatgcagccgcacgaaggcgcggcaggtacgctggagcagcatttacagcgggttattggtcatctgaacaccatgcacaccattagcagcatggcatggcgtcagcgaccgcatcacgggatttggctgagtcgcaagttgcgggatagcaaggcgtaatgcaggctaaaccatcggataaggcattcacgccgcatccgacatcttttgcctgatgcttcgtatttacgccccaaccaccttcgccaccgcgtgggcgaaacgttgcatcccttcatcgatatccgcatcttccaccaccaggctcggtgcaaaacgcatcacatccggtccggcattcagcaccattacgccagcctctgcgcccgcatacaggaaatcacgcgcccgacctttgtactgtggtttcagctctgcgccaatcaacagccccataccgcgaatatcgctaaatacatcgtactgctgatcgatcttctgcagatggtcaacaaaacgctggcgtttcgcctgaatgccttccagcacttcaggggtattgatgatatcaaacgccgcccccgctactgcacaggccagaggattaccgccgtaggtggaaccgtgagaaccaggatgaaacgcagaagcaatttccgccgtggtcagcatggcgctaatcgggaagccgccgcctaacgctttcgcagaggtcagaatatccggcgtaacgccgtagtgcatgtaagcaaacaaatcgccggtccgccccatcccgcactgcacttcatcaaacaccaataatgcctgatgttgatcgcacagctcgcgcaagccctgcaaaaactctggcgtcgctgccgtcacaccgccctcgccctggatcggctcaaccaccaccgcacaggtgtgatcatccatcaccgctttcactgcatggagatcgttaaagggaacgtggatgatgtctgccggtttcggcccaaagccgtcggaatattttggctgcccacccacgctaacggtaaacaggctgcgaccatgaaaagcgttatggaaggcaataattttggttttgaacgggctatgacgcacacaggcgtaatggcgtgccagtttaaaggcggtttcgttagcttccgtgccggagttcataaacaccacgcgttcggcaaacgttgcctcaatcagtttacgcccaagacgcagcgccggttcattggtgaaaacgttactgatatgccacagagtttcgccctgggtttttaacgcgttcaccagcgcaggatggcaatggcccaacgccgtaactgcaatgccacccgcgaaatcgacatactccttgccttgctgatcccagattcggctgccctgaccttttaccggaataaactctgccggagcataaatcggcaggatcacttcatcgaaagtcgcgcgtgtaattgctgtttgttcaattgccatctcatgatcaccctgttacgcataaacaaatgtgaaattataaccacaaaatatgcataaaaaatcactaaatggcaatcagaaatcagcgatgcaggaaattagccagcagttgatgtccttgttcgctaagaatactttctggatggaactgcacaccttccagatcccactggcgatggcgaatccccataatctctcgggtttcgctccaggccgtcacgtcaaagcacgctggtaaactgtcaggttccaccaccaggctatggtagcgtgtcacggtaagtggatttgccagcccccgaaatacgccctcaccgttatgtgtaatcgggctggttttgccgtgcatgacctttgcggcgcgcacaactttaccgccaaatgcctgcgccattgcctgatgaccgaggcagacgccaagaatcggcaagcgcccggcatagtggcgaataacgtcaagggagatcccggcttcatctggcgtacaggggccaggactgatgacaattttttgtggtttaagggcgtcgatatccgccagcgtcaacgcatcgttgcgcttaaccagcacatccgcccccagttcacaaaagtactggtagaggttccaggtaaaagaatcgtagttatctataagcaggatcatggcggctccggtacaaaagaaccgcgctattttactcagattccccggcttcgcttaccactttgctaaatatcatctgcagtgcggtgagatcccccattgccccactctgatttgcctgattccaggcctctttttcgataccctgccagctcagttgatatccggcatgaatcgccagttgctcgaagaagatccgctgtgccagaccacttcccacccggaagggatgcagcacgttgatttcacaatagtaatgcgccagccgctcgacgaacttcgctttctccaggccaaccagataaccttcttcctccagatcctgcatcagggcattgccctctttttcgatataagcaaagtggcagaacggcgtatcaccctgataaatatcaacttcacgcagttgccctgcccagtcgaaaatatcctgatacagctggcgatggatagttcgcaaatgcggtaaaccgcgcaccagcggaccaagctcaatggtcgcagcacgcagcgccgtcatttcgtaagcggcctgttccagccgctgctgctggcggatgttcagccggttacgcatgatatcaaggcctggataaagatacggatcgcgcccttcgccgaatttatcgctcatagtgactcctcagctcttcaaggcgcgctaaagcctctgcggcagtaagagtgactaaaggcatctcgacgccttcaagacggcgactggcctgaaaattacgattacgctgaagctcccagagacgggacttttgcttatcggtgagtttcttcacttgatgcctccctgaacgtgtccatttgccacaagtataagcggcaaatccgggttacgccgggagagcagaagcgcgggcaagattgcccgcgcgagaaatcattacggcaggactttagcggaaaggataactaccggtttactcggcacattctggtacggaccaacgtcatgagtcggcacctgggaaatcttatcggcaacgtccatgcctttcaccactttaccaaataccgcgtaaccgaaatcacgctgaccatggtcaaggaaggcgttatcggcaacgttgataaagaactggctggtggcgctgtctttgtcagcggtacgtgccatcgcgatggtgccacgcgtgttgcgcaggccgttatcggcttcatttttgattggcgggtttggttttttctgctgcatctgctcggtgaaaccgccgccctgaatcataaagccaggaatgacgcggtgaaaggtagtgttgttataaaaaccgctgttcacataatcgacaaagttttgcacagacactggcgctttttgtttatccagctccagttcgatgttaccagcactggttgtcaacaatacgtgcgggtcccctttcgctgccattgctgcgggagaaagagcagaaagagcgaaaacagcagccatcgccgccagggtgcttttgaacatgagatttccttaacaaacagagcagaaaaaaagcaagtgaagagattctaaatagccttcaagaacaaggccatccctttacctaattttacgtatctgaaatatatgtaacctgacgatcactttttattccgtgatcaaaatcacctcttaaaatgcaatttagcaaccgattgcaataaaacatttaaacagatcacaaaatcacctaaaatcgcccgctcgcggcatatcccgctatgccattttatttttgaacgcaggccaatcatgactaacagcaatcgcatcaagctcacatggattagctttctctcctacgcactgactggtgcgttggttattgtcaccgggatggtgatgggaaatatcgccgattatttcaatctgcctgtttccagtatgagtaataccttcaccttcctcaacgccggcattttaatctctatcttcctcaacgcctggctgatggaaatcgtcccgttgaaaacgcagttacgttttggctttctcctgatggtgctggcggttgccggtttgatgttcagccacagcctggcgctgttcagcgcggcgatgttcattctcggggtggtcagcggcatcaccatgagcattggtacattcctggtaacacaaatgtatgaagggcgtcagcgcggttcccgcctgttatttaccgactccttcttcagtatggctgggatgattttcccaatgatcgccgcgtttctactggcgcgcagcattgagtggtactgggtttatgcctgcatcgggctggtgtatgtcgctatttttattctgaccttcggctgtgagttcccggcgctgggcaaacatgcgccaaaaacggatgctccggtagagaaagaaaagtgggggatcggcgtactgtttctctctgttgcggcgttgtgctacatcctcggtcagttaggttttatctcctgggtgcctgagtatgccaaaggcctgggcatgagcctgaacgacgcgggcacgctggtgagtaacttctggatgagttacatggtcggcatgtgggcgttcagctttattcttcgcttctttgatttgcaacgcattctgaccgtactggctggtctggctgcgattctgatgtacgtctttaacaccggaacaccagcacatatggcgtggagtattctcgctctgggcttcttctccagcgcgatctataccaccatcatcaccctgggtagtcagcagaccaaagtaccgagcccaaaactggttaactttgtcctgacctgcggaaccatcggtactatgttgacctttgtggttaccggcccgatcgttgaacatagcggtccgcaggcggcactgcttacagcaaacggtctgtacgctgtcgtctttgtgatgtgcttcctgttaggtttcgtcagccgtcaccgtcagcataacaccctgacctctcattaattgctcatgccggacggcactatcgtcgtccggccttttcctctcttcccccgctacgtgcatctatttctataaacccgctcattttgtctattttttgcacaaacatgaaatatcagacaattccgtgacttaagaaaatttatacaaatcagcaatatacccattaaggagtatataaaggtgaatttgatttacatcaataagcggggttgctgaatcgttaaggtaggcggtaatagaaaagaaatcgaggcaaaaatgagcaaagtcagactcgcaattatcggtaacggtatggtcggccatcgctttatcgaagatcttcttgataaatctgatgcggccaactttgatattaccgttttctgtgaagaaccgcgcatcgcttatgaccgcgtacacctcagctcttacttctctcaccacaccgccgaagagctgagcctggtgcgcgaaggcttctacgagaaacacggcatcaaagttctggtcggcgaacgcgctatcaccatcaaccgtcaggagaaggtgattcactccagcgccggacgtaccgttttttatgacaagctgatcatggcaaccggttcctacccgtggatcccgccaatcaaaggttctgatactcaggactgctttgtctatcgcactattgaagacctcaacgccattgaatcctgcgcccgtcgcagcaaacgcggtgccgttgttggtggcggcctgttaggtctggaagccgcaggcgcgctgaaaaacttaggtattgaaacccacgttatcgaatttgcccctatgctgatggcagaacagcttgatcagatgggcggcgagcagctgcgtcgcaaaatcgaaagtatgggcgtgcgcgttcacaccagcaaaaacacccttgagattgtgcaggaaggtgttgaagcgcgtaaaaccatgcgttttgccgacggcagcgaactggaagtcgactttatcgtcttctctaccggtatccgtccgcgcgataagctggcaacccagtgtggtctggacgttgctccgcgtgggggtattgtcattaatgattcctgccagacttccgatccggatatctacgccatcggtgaatgcgcaagctggaacaaccgtgtatttggtctggtagcacctggctacaaaatggcgcaggtcgccgttgaccatattctcggtagcgaaaacgcctttgaaggtgctgaccttagcgccaagctgaaactgctgggcgtagacgtaggcggtattggtgatgcgcacggtcgcacgcctggcgcacgtagctacgtttacctcgacgaaagtaaagagatctacaaacgcctgattgtcagcgaagacaacaaaaccctgctcggtgcggtactggtgggcgataccagcgactacggtaacctgctgcaactggtgctgaacgctatcgaactgccggaaaacccggattccctgatcctgccagcacacagcggtagcggcaagccgtctatcggtgttgataaactgccggacagcgcgcaaatctgctcctgcttcgacgtcaccaaaggtgatctgattgctgccatcaacaaaggctgccacacagttgcggcgctgaaagctgaaaccaaagcgggtactggctgcggtggctgtatcccgctggtcactcaggtactgaacgcggaactggcgaaacagggcatcgaagttaacaacaacctgtgcgaacactttgcttatagccgtcaggaactgttccatttgatccgcgttgaaggcattaaaaccttcgaagaactgctggcgaaacacggcaaaggctacggttgtgaagtttgtaaaccaaccgtcggtagcctgctggcctcctgctggaacgaatacattctgaagccggaacatactccgctgcaggattctaacgacaacttcctcgctaacatccagaaagacggcacctacagcgtgatcccgcgttctccgggcggtgaaatcaccccggaagggctgatggcggtaggtcgtatcgcgcgtgaatttaatctctacaccaagatcactggctcccagcgtctggcgatgtttggcgcacagaaagacgatctgccggagatctggcgtcagctgattgaagccggcttcgaaaccggtcatgcctatgcgaaagcactgcgtatggcgaaaacctgcgtgggtagcacctggtgccgctacggcgttggcgacagcgtcggcctcggcgtggaactggaaaaccgctacaaaggcatccgtacgccgcacaaaatgaagttcggtgtctccggctgtacccgtgaatgtagtgaagctcagggtaaagacgtgggtattatcgccactgaaaaaggctggaacctgtatgtttgcggtaacggcggcatgaaaccgcgtcatgcggatctgctggcggcggatatcgatcgcgaaacgctgatcaaatatctcgaccgcttcatgatgttctacatccgtactgccgacaaactgacgcgtaccgcaccgtggttagaaaacctcgaaggcggcatcgattacctgaaagcagtgatcattgacgacaaactggggctgaacgcacatctggaagaagagatggcgcgcctgcgtgaagcggtactgtgtgagtggactgaaacggtcaatacgccgtctgcgcagactcgcttcaaacacttcatcaacagcgacaagcgtgacccgaacgtgcagatggtgccagagcgcgaacagcaccgtccggcaacgccgtatgaacgtatcccagtaactctggtggaggacaacgcatgagccagtggaaagacatctgcaaaatcgatgacatcctgcctgaaaccggcgtctgcgcgctgttaggtgacgagcaggtcgcgattttccgcccgtatcacagcgatcaggtgtttgcgatcagcaacatcgacccgttcttcgagtccagcgtgctgagtcgcggactgattgcggaacaccagggcgagctgtgggtcgccagcccgctgaaaaaacagcgttttcgcttaagcgacggcttgtgcatggaagacgaacagttttccgtcaaacattacgaagcgcgagtgaaagacggcgtggtgcagctgcgcggttaatgttttaacgggaggcgcaatgcctcccctttttgcatggtcctgtaataatcttcggtatattgcaggacattttttaaactttttgttttattttttgtttttattttttaaaggataatcaaatgtttacagacactattaataagtgtgcggctaacgctgcgcgcattgcacgcctgagcgcaaataacccgctcggcttttgggtcagctccgccatggcgggcgcgtatgtgggtcttgggatcatcctgattttcacgctcggtaatttgctcgatccatccgtacgccctttggtgatgggcgcgacctttggtatcgccttaacgctggtgattatcgccggttctgaactgttcaccggacacaccatgttcctcacctttggggtaaaagcgggcagcatcagccacgggcaaatgtgggcaatcctgccgcaaacctggctgggtaacctggtcggttccgtcttcgttgccatgctctatagctggggcggcggtagcctgctgccggtagataccagcatcgttcactccgtcgcgctggctaaaaccactgcaccggcaatggtactcttcttcaaaggtgcattgtgtaactggctggtttgcctggcaatctggatggcgctgcgcactgaaggggcggcgaaatttatcgctatctggtggtgtctgctggcatttatcgcgtccggctacgagcactctatcgctaacatgacgctgttcgcgctctcctggttcggcaaccacagcgaagcctacacgctggcgggtattggtcataacctgctgtgggtgacgctgggtaatactttaagtggtgccgtattcatgggattgggttattggtatgctacgccgaaagcgaatcgtccggttgcggacaaatttaatcaaactgaaacggctgccggttaattactaaggggtttttacgtggatcatttgcctatattttgccaattacgcgatcgcgactgtctgattgtcggcggtggtgatgtcgcggaacgcaaagcaaggttgctgttagacgcaggcgctcgcttaacggtgaatgcattagcgtttattccacagttcaccgcatgggcagatgcaggcatgttaaccctcgtcgaagggccatttgatgaaagccttctcgacacctgctggctggcgattgcagcgacggatgatgacgcgcttaaccagcgcgtcagcgaagccgctgaagctcgtcgcatcttctgtaacgtggtcgatgcgccgaaagccgccagctttattatgccgagcattattgaccgcagtccgctcatggtagcggtctcctctggcggcacctctccggttctggcacgcctgttgcgcgaaaaacttgaaagtctgctgccgttacatctgggccaggtagcgaaatacgccgggcaattacgcgggcgagtgaaacaacagttcgccacgatgggtgagcgtcgccgtttctgggagaaattgttcgttaacgaccgcctggcgcagagcctggcaaacaacgatcagaaagccattactgaaacgaccgaacagttaatcaacgaaccgctcgaccatcgcggtgaagtggtgctggttggtgcaggtccgggcgatgccgggctgctgacactgaaaggactgcaacaaattcagcaggcagatgtggtggtctacgaccgtctggtttctgacgatattatgaatctggtacgccgcgatgcggaccgtgttttcgtcggcaaacgcgcgggataccactgcgtaccccaggaagagattaaccagatcctgctgcgggaagcgcaaaaaggcaaacgcgtggtgcggctgaaaggtggcgatccgtttatttttggccgtggtggcgaagagctggaaacactgtgcaacgcgggtattccgttcagcgtggttccgggtattaccgcagcttctggttgctctgcctatagcggtattccactcacgcatcgcgattatgcccagagcgtacgcttaattaccggacacttaaaaaccggtggcgagctggactgggaaaacctggcggcagaaaaacagacgctggtgttctatatggggttgaatcaggccgcgactattcagcaaaagctgattgaacacggaatgccaggcgaaatgccggtggcaattgtcgaaaacggtacggcagtcacgcagcgcgtgattgacggtacgctcacacagctgggagaactggcgcagcaaatgaacagtccaagcctaattattattggtcgggttgttggcctgcgcgataaactgaactggttctccaaccattaatttaacccgggccagagaattctggccttcttaatgactctttttatatattcagcaaataaaacatagccccttaataaatattatctgctaatgggttatattcaccgttacagcgacttacaaaattaagtcattcgctcactgacgccaattaaatattcctgtatcgttcttaacgagcagtctgcttatattcatataatcaatgaatattaattaatatataatacatagggaatgtaaatgaacaaatttattaaagttgcactggtaggtgcagtactggctacgttaactgcatgtactggtcatattgaaaaccgtgataagaactgctcttacgactacctgctgcacccggcaatttctatttctaaaatcattggcggttgcggtcctactgcacagtaagtctctgacagaaatcggctaacaccggtttaattgcccgacgccctctggattttccgagggcgtatttgtttctatgtccttcttgcccccgcccgtaaaaatattttcactttaaattcaatttgataactacatccattagccacagcgcgatcctgtgcgaaattttgtgatcttcctccacattacataacatcatatgttgttatattcatcatgcattgtcatgttaccttttaaatgactgcaaactctcccctacaacgtattggacaagaaaaaggtatcgctatgggaagccaggaactccaacgcaagctcggattttgggccgttcttgcaatcgccgtcgggacaaccgtcggctccggtatttttgtatctgtgggtgaagtggcaaaagcagcgggcacgccgtggcttacggtgctcgcgtttgtcattggcgggttaattgtgatcccgcaaatgtgcgtctatgcggaactatccaccgcttatccggaaaatggcgcagattatgtttatctgaaaaatgccggaagccgaccgctggctttcctctccggctgggccagcttctgggccaacgatgcgccgagtttgagcattatggcgctggcgattgtcagcaatcttggctttttaacgcctatcgatccgttgctcggtaaatttatcgccgccggattaattatcgcctttatgttgctacacctgcgctccgttgaaggcggcgcagcgtttcagacgctaattaccatcgccaaaattatcccgttcactatcgtcattggccttgggatcttctggtttaaagcggagaattttgccgcccctaccaccactgcgattggcgcaacgggcagctttatggcgctgctggcggggatctctgccaccagttggagctataccggcatggcctctatctgttatatgaccggcgaaattaaaaaccccggaaaaaccatgccacgagcgctgattggttcctgtctgctggttctggtgctctacaccctgctggcgctggtgatttccggcctgatgcccttcgacaaactcgccaattctgaaacgccgatttccgacgccctgacctggatccccgcactcggcagcaccgctgggatctttgttgccatcacggcgatgatcgtcattcttggtagcctttccagctgcgtgatgtaccagccgcggctggaatacgcgatggcgaaagacaacctgttctttaaatgcttcggccatgtgcatccgaaatacaacacgccggatgtctccatcatcctgcaaggggcgctggggatcttcttcatcttcgtttccgatctcaccagcctgctgggttatttcaccctggtgatgtgtttcaaaaataccctcaccttcggctccatcatctggtgtcgtaaacgcgacgattacaaaccgctgtggcgtactccggctttcgggctgatgaccaccctcgccattgcgagtagcctcattctggtcgccagtacctttgtctgggcaccgattcccggccttatctgcgccgtcatcgttattgctactggtctgcctgcttacgccttctgggcgaagcgtagccgccagctcaacgctttgagctaatgttatctggagaaaataaaatgttggatattgataaaagcaccgtggactttctggtcaccgaaaatatggttcaggaagtggaaaaagttctcagccatgacgttccgctggtgcacgccatcgtggaagagatggtgaagcgcgacattgatcgtatttatttcgttgcctgcggaagcccactcaacgcggcgcaaacggcgaaacatctggcggatcgcttttccgatcttcaggtctacgccatttccggctgggagttctgcgataacaccccgtatcgcctcgacgatcgttgcgcagtaattggcgtttctgactacggtaaaaccgaagaggtaatcaaagcgctggagctgggccgggcctgcggcgcactcactgcggcgttcaccaaacgcgcggatagcccgattaccagcgcggcggaatttagcattgattatcaggccgactgtatctgggaaattcacctgccgctctgctacagcgtggtgctggagatgatcacccgcctcgcgccgaacgcggaaatcggcaagatcaaaaacgatctcaagcagttgccgaatgcgctcggtcatctggtacgcacctgggaagaaaaaggccgccagcttggtgaactggccagccagtggccgatgatttataccgttgctgcgggtccgctgcgtccgctgggttacaaagaaggcattgtaacgctgatggaatttacctggacgcacggctgcgtgattgagagcggagagttccgccatggcccgctggagattgtcgaaccgggcgttccgttcctgttcctgctcggcaatgatgaaagtcgccacaccaccgaacgcgccattaactttgttaaacagcgtactgacaacgtgatcgtcatcgattacgccgaaattagccaagggctgcacccgtggctggcaccgttcctgatgttcgtgccaatggagtggctctgctactacctgtctatttacaaagatcacaacccggatgaacgccgctattacggtggtctggtggaatattaatccctctcccggcccggcaacgggccggatttacgcaaggagttacccgatgaaaacaggtatgtttacctgcggccaccagcggctgcctattgaacacgcatttcgtgatgcaagcgagctgggttacgacggcatcgaaatttggggcggtcgcccgcacgcgttcgcgccggacttaaaagcgggcggcatcaaacaaatcaaggcgctggcgcagacgtatcagatgccgattatcggctatacgccagaaaccaacggctatccgtataacatgatgctgggcgatgaacatatgcgtcgcgaaagcctcgacatgatcaagctggcgatggatatggcaaaagagatgaacgcgggttatacgctgatttccgcggcccacgcgggctatctcacgccacctaatgttatctggggacggctggcagagaacctaagcgaactgtgtgagtacgcggaaaacatcggcatggatctaatcctcgaaccgttaacgccgtatgaaagcaacgtcgtgtgtaatgctaatgatgtgcttcatgcgctggcgctggtgcctagcccgcgcctgttcagcatggtcgacatttgcgcgccgtatgtccaggcggaaccggtgatgagttatttcgacaaactgggcgataaattacgtcatctgcatattgtcgacagcgacggggccagcgacacgcattacattcctggagaaggcaaaatgccgctgcgggaactgatgcgcgatattattgagcggggctatgagggttactgtacggtggagctggtgacgatgtatatgaacgagcccagactctatgcccgccaggcgctggaacgctttcgcgcgctgctgccggaggatgagagatgaaaaccctggcgacaatcggcgataactgcgtcgatatctacccgcaactgaataaagcgttttctggcggtaatgcggtcaatgtggcggtgtactgcactcgctacggcatacagccgggatgcattacctgggtgggtgacgatgactacggcacaaagctgaagcaggatctcgcccgcatgggcgtcgatatcagccatgtccatacgaaacacggcgttaccgcacaaactcaggtggaactgcacgacaatgatcgcgtttttggcgactacaccgaaggcgtgatggccgactttgccctgagtgaagaggattacgcctggctggcgcagtatgacattgtgcacgcggcaatctggggacatgcggaagacgcattcccacagctgcacgctgcgggcaaacttaccgctttcgacttctccgacaagtgggacagcccgctctggcagacactggtgccgcatctcgattttgcctttgcctccgcaccgcaagaagacgaaacgctgcgtctgaagatgaaagcgattgttgcccgtggcgcaggaacagtgattgtcacgctgggtgaaaacggcagcattgcctgggatggcgcgcagttctggcgtcaggctcctgaaccggtgacggttatcgacaccatgggtgccggagatagcttcattgccggattcctttgcggctggtctgcggggatgacattaccgcaggcgatagcgcagggaacggcgtgcgcggcgaaaaccattcagtaccacggtgcctggtaagtataacgttggcgtgagcatcttcacgccaacgtgctgttacttgccggaaaacgaccctataatccgagtaattcattctttatttcagggtcgattatgagtgctacggaccgctactctcatcaactcctctacgctaccgtccgccagcgactgctggatgatatcgcgcagggggtttaccaggcgggcaacagatccctaccgaaaacgagctttgtacacaatataacgtcagccgcattaccattcgcaaagccatcagcgacttagtggcagacggcgtactgatccgctggcagggaaaaggcacctttgtacaaagccagaaagttgaaaacgccctgcttactgtcagtggttttaccgattttggcgtcagtcaaggcaaggcgacgaaagagaaagtgatcgaacaggaacgggtcagcgccgcgccgttttgcgaaaagctgaacatccccggaaacagcgaagtgttccatctctgccgggtgatgtatctcgataaagagccgctgtttattgatagtagttggatcccgctgagccgttatcctgactttgatgagatttacgtcgaaggaagctccacctatcagttatttcaggagcgttttgacacgcgagtggtcagcgacaaaaagaccatcgatatctttgccgccacccgcccgcaggcaaaatggctgaaatgcgaactgggcgaaccgttgtttcgcatcagcaaaatcgcctttgatcagaatgacaaaccggtgcacgtctccgaactcttctgccgcgccaatcgcatcaccttaactattgataataaaagacattaaccgtaggccggataagatgcgccagcatcgcatccggcgatgctggcgcgttgaattttacatcccgtacgttcccctcaccctaaccctctccccaaaggggcgaggggaccgttcagtacggaatttagcttgacggtgctatccagcattaaatactggcaatactctcacgcaaaatccgcagcaccgtctcttcaccgctgcgattcgggttaatgcgaatcgcacaatgttcactttgtggattcgcctggcgaaacgttccggaaaggcgataaaagagcggcgggatttcatatttgctctctgcacccaccgggtaaggcaaggcaccgcgcttttgcgcctcttccagcactctggcggcaatcggctgatgaaactcgacaatcaacaccttgctctgcgcattagcaatcaccgcgcttttcacttccggcaccgcaccaccgttaagcaaagccagcaaccgttcagatacccctgcctgcaccgcgtgcatcactggcgcaaacaccagaccacgcaatacttccagcgcctgtgcgccctggatctggctaccgccggagtaaagcgtggcgcgaatacggttgataacatcagcatcgccgaccactgcaccaacaccctctggcccaaatagcttgaagcaggaaaatgtgctgacattcgcgccgcattcacagccgattcgagccaccttcatcaccgcatagttgtcatcggttaacgctggaacacctgccgcgcgcaacgttgccagcacatctgccagcacgtagctgtcctgcggctgctggcgcgtatgctgcaccagcgccgcatccggttgttgctcgtcgacgacctgcttcagtgcgctcaggtcattgaaatcaacagtaataagcgtcagccccatctgctcaataataacccgtgtcgtcgggtaaacaggcgcgtcatgcaccagaagacgctgccccggtttgagcaaagccgccagcccggcgcgaatcgcgccagtccccgcgtcctgcaccagcgccgcagcctgtgcgtgaaatgcatcagccagcacctgttccacacgctgggtaacgcgcggttgattcagtcctggcgttaagcctaaatcaccgccagtaagaaactcgctgccggggaaatggcgacaaatgctatccaccagcgcaaactgcttttgctgcgcctcaataatcgtcaggctttgcagaggaaacgtcttcataggtgccttccttaagccggaacgaacaggccaagccagtaaagaacattcagcagaataccggtgatcattactgccacgaccggtgccgccattttctgtaccggacggcccagggattcgttgaggaagtaaatggcaaccgcgatagagaatccggtataacccgccatcttaattgctgcgaaaatgctaccgaccagcagcgccacttccatcagcatattcatggcgttacggatgttatcgctcgcattacgcacgctcgggtagcgtcccagccatttgccgatgctacgaagcagcaagacttccgcgctaataaccactgcgcctaataccgctgcaaccatcggattcgggctgagatagtccaccgcataaacaaaggtaaagcccgcaactgcatacacacccgttgctaacgcggtggtggcaatcaacggcacaaaccccagtccgcgcataaattctgccagagccgcctgattaatcagcgtttggctttgttccggcgttacgcctgcggaatatgctttctccagtgtgaagatgctcacttcactgccagcaaaaatcttcatgctggcaacggcggcaatcaatgctcccacgatggcgatatagggtaagtttttgataatccgactcgtgcgttcttcaaacacgctaagcccgctggcatcaatgtcattttcatcacgatgacgcaggtcgtgagttatcgcgatccccagcagcatcaccatgccaataaagatttcgatggattcagggttaagatgtgggaaatagcgcacgactaccacacgggtcatcagtaccaccacggcggcgatcagactttgcttccagccaaactggtagaaaatcgccaccagcgggaacagtgcaaaagcactaaccaccgggctgcttaattcccccaggctacctaatacatccaccggcagcgcggtcagcagctggtttactggcaacaggcaagtaaggatcaacacgccccagatagcgccaagaccaaacgccatcaggctgtttatcgccaggacgccgaggatatcggtaggaagaaagagtaaccatgcgttgagcagcccggttttcagggtaaaagagatccccacgctggccacaaaaccaatgctcagaccaaaagcgatactccccgcctcgcgacggttcatatagccttcaatcagttgcggcaggatcgggcggatgccgtcatgaaaaacagccgcgctgcgatgcgccagaaggcttgtcatacccgtcaggcacgccaccacgataatctgaatatacagatccatagtcgtgccttttatttcagatggttaatcagcatcggaatcgcgtgttcgacgtgctcaacggaaaggccaaacgccacttttccttcagcgatcattttggcgatatgctcgtctttcgctttaatgcctggtttggcaatggtgcaacttttgttatagcctatcaccgcgatggcaatgctcaatgccgcgcccgcaccggtattacacgcgccgatgtaataatccagttgcccggatttcaccttcattgccgcttccatgtcgttgtgaatgaaaacttcaaaacagccaggagccgtcgcttcaatagtttttttaatctgctcacgctgtaagcctgcaacgccaatctttttcatgagtctgtccttattggaaaaattgagagggattttcacgtaacatcacatccacatcggcctgactgaatccactctggcgcaattgcggaataaaggtggttagtaaatagtcatagccataaccaccgttggcttttaaatgggagcggcgcgtaatatccatgctcagcatgacgcggttcagcaacccacggtcgcgtagcgcatgaagcatcgcaatacgcttttcgtccgggtagtaactgttcttgccgatggtgtcgaactgcacgtacgcgccgagatcgatcatcttcaaaatgttgtcgaggttgtctttcagatcgcagtgaccaacggtgacgcggctaagatcaaccccgtgggcttgtagcaacgccagttgctccagccccatcgtgctgaagctcgtatgcgtggagatcgggcgtccggtctggttatgcgccagcgcagcggcaataaataccttctcttccagcggcgtaatctttccttcgctggtgccgatctccgcgatgatcccggctttcagctccgtgccatcgataccctgttcaatttcatcgaccatctcctgcgccagttcctgcacgctgcgggtcgccacatgttccgggaaaaacgcgtcctggtaataaccggtacaggccaccacgttgatccccgtctcgcgcattacatcaagcataaattgcgcattgcgccccatgtaacggttggtcatctcaatcacattacgcacgccccgggtcatcaggtcgttcatctcctggcaaatgaacgcatactgatcaaggcggcagtccacgttgtttttaaagccggagagatcaatatgcagatgctcatgggcgagggtgtaacccgtcggatcaaaactcatagggtgtctcctgcaaaccggagggaggaaagaaaagagcgaccattttgtggcggtggcgcgcggaaaaattcacacacggtagcccccacatcagaaagcgtggtgcgcacaccgagctgcgtagcgatcatcccttgctgataaaccagcactggcaccacttcgcgggtatggtggctgtgaccaatggtcggatcgttgccgtgatccgccatcacgaccaggcaatcatctggctgcatcgcctcaacaagccgggcaaggttacggtcaacgacctgcaaacgttcggcataacgtgcgacgtcttctgcatgaccagcgaggtcggtttcctgaatgttggtgcaaataaacgccgtcggatgggtgttaaattcgttgagggtgatatccataatccgctggctatccaccagattttgccagctcacgccataaggattgttgacgatatctgccaccttacccaccagcacggttggcacgcctgcttcatacagtttttgtggcacctgcactttttcatcgacgccatagcccatatgcacgacctggaaaccgttgtcataagcgccagaacgcggcgcattgataccaataaagcgcccttctttgctttctgcggcatcgagaatgcgttgactgtcggttaacaggccaccaaatgtaatgacccgaccgacctgtacctgctcacgcacgatacgaccaattttgattgcgtcgtcaaaagagatcacagagagattggcggtaatgttatagacctggcctaaatccgcctcgagattatcgccaatcgcaaccgcctgattgacccacagaaattgcagatcatcgccacggcgctccacctgccagccagcggaaactaatgcctgctcaacacggtcaatcacatcgcgaaaaggcatccgcagcggcggtaacgggcgcgtgcctaaaatttcctgatgccccataaaggtatcgccaccttcatgttgcagctctgccacgccccaggttgcggaatcactcggctgcatatcgcctggcgcataacccaatgcgttgattagccccagcgtctccagcgttggtagctgcaaatgcggcaactggctcaggatgtgaccacatgtattcgctcccgcatcttgcggacgcaccagcgtgacatctttcattgcccctacgccaaagctatcaatcactaacaccacaaatcgcgccattacgcccccagagagtttccaagactgtcataacgaccgacgatttccggttcgccacgatgaataccggacaccagcaccacatcgctacgggtgacaaaaatctgcgtgcgaaaacagagcaccactgcactgcttaccggaaactcgcctgccagcggcagggtgtagtcgatactgctgtcatccacagttttgagattggtttcagtaatcttttgattttctggcgtaaacaccaacgcatgttgcgcatgaccacgacgatagtaaccgccgccgtagcagtagctgtcgccacggaaatgatgggagatttcacttaaccagagcatcgcgatacgttcaggctgatcgccctgctggtttgccggaatagtgcccgtcagcgcatgaccgggttcggcatgagtcacaccgtattgcgccagtaatggcaggctagtgcagctggtcgcactaggcgcgttcagttgctcaagtgcaataccagatttcgccagttgatcccgtgcctgtatcagcgtgtgaagattcggtgtcggcaaaacttttccgacagcctcatcccaaagcaggcaagggaaatgggtaagtccggctaaatgcagccctggcagattctggatttcggcgacaatctccggcaacaccttgagggcaaaaccgctctcctggcccggataaagaaaatcatcgtcgctataaactttaagcagcacagactggattcgcccggccttcaccgccgccgcagaaacttcccgcgctttgtcgagagtaaacacggtgatgacgtcggtgccctgttcaacggcgtcagcaacctgatgacaagggatttgtaccagatgcccctgatgcgccacaggcaaaccagcgcggcgcatgactcgcgcctctttgtaatccaccgccacaatgccgctgtagcctaatgccagcaatttttccgccagccacggattacgaccaaactgcttggtcatcagatacagttcaatgccgtaaagccgcgccgtctcaatcagccgcttaccgttttccagtatctgatccacgtcgatcacccagctgtccggggcgatcttgccctgctgccacaggcttagtgcggcggaaatcagcgccgggttctggcgtttcaatgcttctacaaacatcttgttgcctcgtttctgttccttgaattaaatattcatttttttgaatatttaggttgtgcgacgtggatttgtcgggagcttcaaacctcttcgttagcagccatccataatccataaaggttggccagcaaatagccttcttcacacgggttaacttccagtgcgaattccttcaacaacacctgatgcaattgcacaacggcttgccagtggctggattgcgccagttctgccagcaactcgttatccagcggctctatttcttcaccacggcgactgcgcatcagtgcactcgccatatgtgtcatcgccatcgttccttgctcactgcgcaccggcagatggcactctgtttccagtacgttgacgacctgcatcatgcctttgcagatgtccttatcaataacgcctgcctcgcaaagcaggttgagtctggtttccatatcagatgcctttcgtttaataactcggttcctgttccccactcactacccgttgttgatgggcgagcagggcgtgtttatctacaacggcacgcagcagttgttgcattgggtaatcatcgactcgcgtcaggaccacggcttcggtggcctgtaaaaatcgcggatcgtctgtgagcggcgtcgcctctaatcccagcatggtcagttcgttttccgccaccacgttccagatcaccgcatcgacatcgcctttaacaatgcgttgtaaactctcgtgataagagagatcgactcgttccacatcactaccgccaaaaaaaacatcggtcatgattttctgatccgcgctacggttatccagccccacgcgcttcacgtttgcggactcgcctttacggcaaatcaactggtgctcgccaacgtaggtgtgcggccccaactccagcgcgaggcataagcctttttgcgtgagataactttccgccgctagtcggctaaccaccgccatgtcatacacgccattaagcagacactccacgcgaatatccgcgccacgcatgtgcgcatagtaaaaaggaatgccatcaaactgggctttcaatccgctcgccaggccttcgtacaaacgggtatagggcaagggcattgcacataccacgttgttgatatccacatgagtcagcaatgctttgttatccatctcgaccagataactgccattgcgcccacggcgttcaatccgtatcgctccgctactttccagcgttttcaacgcggcctgcgtcaggccaacggaactacggcattcatttgccagctcatctatggttttcaatcgattaccgcacttttcacccaacaaataacgggccagcgtcgtgatgacgacgccttcttttttgataaacgttcgacgcataataaattttcagtaaattgaatatttatatcttcaggaatttgaagataaggcgcaacagcgagatgtggaaacggcgaggcacttcacattttttcggattattgcaaatgaggataaaaaaaccgggtttccccggtttcagagtgatgataaaagcaaaattgcctgatgcgctacgcttatcaggcctacatttccttgcaatatgtgcattactttgtaggccggataaggcgttcacgccgcatccggcatgaacaaagcgcaatttgccagcaatagtgaattacggcttcgccacaaaaccaatcgcttcgtacaccgcttttagcgtacgggaagcgtgcgcgctggctttttccgcgccatctttcatcacctgttgcaggaaggcttcatcgttgcggaaacggtgatagcgttcctgcaattcagtcagcataccggaaacggcatcagccacttcacctttcagatgaccatacatcttgccttcgaactgtttttccagttctgggatgctctggcccgttaccgcactaaggatatccaacaggttggaaacgcccgctttgttctgcacatcgtagcgaactaccggcggctcgtcggagtcagtgaccgcacgtttgattttcttcactacgcttttcgggtcttccagcaggccgataacgttattgcgattatcgtcagacttggacatcttcttggtcggctccagcaggctcattacgcgcgcgccagatttcggaataaacggctccggcaccttaaagatctcgccatacagcgcgttgaaacgctgggcaatatcgcggctcagttcgaggtgctgtttctggtcttcacccaccggtaccagattagtttgatacagcaggatgtccgctgccatcagcaccggatagtcaaacagaccagcgttgatgttctcggcataacgcgcagatttatctttaaactgcgtcatgcgactcagttcgccgaagtaggtatagcagttcagtgcccagcctaactgtgcatgttccggcacgtgggactgaacaaaaatggtgcttttctcaggatcgataccacaagccagatacaaggccagcgtatccagcgtcgctttacgcagcttctgtgcatcctggcgcacggtgatcgcgtgttggtcaacgatacagtaaatgcaatggtagtcatcctgcatgtttacccactgacgcagcgcacccatgtagttaccaatggtcaattcaccactgggctgtgcgccactaaaaacgatgggcttagtcatttttgctttcctgattttcgctatgcggaagccctaatgcgggcagaaggtcatttatagactgataaattacatcaggctggctgagatcgatagcctcgccgtagttatatccgtaggttaagccaacacttgggcaacctgccgcttttgccgcctgaatatcattgcgactgtcgccgacaaacagcatctgttgtggggcaattcccatccgctcagccaccagtaacagcgggtccggatgcggttttttgttttgcacatcatcaccaccaatcaccacgctgaagtatttggcgatatctaaggcttcgagcagcggcgcgacgaacggcgtcggtttgttggtgaccaggcctagcggcaggcctttagcctgcaacgcgcccaacgtatcggcaacgtgcgggaacaaaaacgtcccctcttcggcaacctcgccatagtagcgatcgaacagtttacgcagaatacgtacctgttcttctgccggaatgtcgtcatcaacgggcggtttacccattgttttacgctgagtcgcacgttcctgacgcgcccaggtcaatgcgcgctccatcagaacatctgcgccgttaccaatccaggtaataacgcgttcttcacctgcgacgggcaactccagcgcatacagcgccatatctaccgcagcagcaagaccaggagcactgtcgaccagcgtaccatcaagatcaaaagcgacgccgcgaatatcttcaaacttattcatgacttacctttgccagttcactgcgcatttcatcaatgacttttttgtagtctggctggtcgaagattgcgctaccggcgacgaacatatccgcgcccgccgcagcgatttcgccaatgttgttcaccttcacgccaccgtccacttctagtcgaatgtcaaagccagactcgtcgatacggcgacgtacttcgcgcagtttatccagtgtttgaggaatgaaagactgaccgccgaaaccagggttgacggacatcagcaggatcacatccagcttatccatcacgtaatccagatagctcagaggtgtcgccgggttaaataccagacccgctttacagccattttctttaatcagttgcagcgtgcggtcaacatgctcggaggcttctggatgaaaggtaatgatgctggcaccagcggcagcgaaatcaggcacaatgcgatcgacgggtttcaccatcaggtgtacgtcgataggggcggtaatgccatagttacgcaaggatttcagcaccattggcccaatcgtcagattgggaacatagtggttatccatgacgtcaaaatgcacgacatcagcgccagctgccagggcttttgcggtatcttcacccaggcgggcaaaatcagcgctcagaatactgggggcaatcaaatactgtttcatccgcttctccttgagaattattttttcgcgggactaacgactcctggtttgtacaaagccagcagttcgtccacctttttacgtgtgccgccgttgctgcttatactgcgtcgaactttgacgacatgcaattttgcgcgctgataccactcacgcgttaacatcgtatcgtgattggagatcagcactggaatatggcgctcaaccagaccttcggcgatctccgccagatgcgcttgttgttcaagcgtaaaactgtttgtgtgatacgccgtaaagttggcggtcgcagacagcggtgcataaggcggatcgcaatagacgacggatgcatcatctgcgcgcgccatgctatcggcgtaagactcacaatagaaaaaggcattctgcgctttttcagcgaagtgatacaactctgcttccgggaaatagggttttttgtagcggccgaacggcacgttaaactcaccgcgcagattgtaacgacacaggccgttgtaaccgtagcggttcaaatataaaaacagtaccgcccgacggaacggatcctggcttttgttgaactcttcgcggaactgatagtaaacctcggcgcaatttgtttcgggaacaaacagctcgcgtgcggcctgtacgtactcatcagtacgcatcttcacaatgttatagagactgatcaggtcgctattgatatcggcaaggatataacgagaaaagtcggtgttgagaaacacgctcccggcacctacaaaaggctcaaccagacattcgcccttgggcaaatgccgtttaatatcatcaagcaggggatacttgccccctgcccacttcaaaaaagcgcgatttttcttcatgctgactaactaattacaccttctccggctgtggagaaagctccgacagcatccagcgcttcaggcaactcccgcaacgataaaccattgcgggagataaccttgattacttcagatcggcctgtacctgacgcagcggtttcgcccacgggtttttggcctggacatctgctggcaatgtagataccgcttttttcgcctcttctttgctagcgtacacgccagaaaccaggacataccacggctgaccattacgcgtcgtttcatagacaacgtagtttttcagattctctttcttcgcccaaccgttcaggttgtcgtagttagaggaactgctcagctgcagagtgtaatggctggacggtgcgcttttcaagctaccaacattacctgcggtcttcgccccagcagcgggtgttgctgtggtttgcgccggggatgccgtctgtactggagccgtagtcgccgtctcttttggtgctggcgtagaagtcgcagccggtgccttcgtgctcgccacaggggcagctggttcagtacgcttcggcgtctgtgctaccggcttcggctccgttttcacggttgcttgcggttttttcggttcaatcaccgcctgctgacgagctgggcgcgtagtggacggacgttcagcggtttgcgttttcgccgtgtcacggcttgcattgccattgcgaacaggcgcaaccgttgcgggttcagtcggcaacgtggaattgaccgccacattgttcagctgttgctgattttgtggctgggtcagcgcattgttcaggtcaccctgcacttcaacacgttgttgaccatccgttgccaccggggtttgcccttgagtcggcgtagaagagatcggtggcagagaaacatcctgctgagtattttccgcagacgtggttcccggcgctggctgcacgccattcgcctgatcggtcgcattgccagcaagatcaatactcttctcgccagacgcggtttgatcgctggaagtggtgctgggggcttttagcgcagaaccgataccgatgatcaacagcagtagaaccagaatgccgacgcccatcatcatatactgacgagaagcgggtttactggctgcttttttgcgcttacgcggacgacgctctacgcgctcttcatccacggtttcatcttcggattcgtcaatttcttcttcgatttccggttcctcattgcgctctttttgcgcacgagtcggacggcgatcgtcagtgtcatcaagttcaatatcatcaaaattgatctgcggttcgccacgttcagtacgctcagaacgttcagaagattgacgagaacgaccagtacgacgatcgctgggatcgggtttcagctcgtcttctggtttgaattcatccatttaacaccccactaaaaggttaatgcttaccacgttgcaattaacctgaagctaatagaccgcttgataagcggcctgacctttcttgttgttacgcactttgacaatcggcaatggcgttaagaacaagctcgtggctaacgccgctgcgaacttcactcttaccaattgccaacggaagaattaagcgcatctctcccgcaaggactttcttgtcacgcagcatatgcggtaaatacgcctgcgcggacatttcgcgcggcccattgaccggtaacccagcccgcttgagcagggttataatacgctgcgtttcggcagaactaaactgcccgagacgttcgctcgtccgcgccgccatcaccatacccgcagcgaccgcttcaccatgtaaccaattgccataccccatttcagcttcaatggcatgaccaaaggtgtgtcccagattcagtaaagcacgtaacccggtttcgcgctcgtcggcggcgacaacttctgccttcagttcacaacaacggcgaatacagtacgccattgccggaccgtccagacgcaacaacgcatccagattctcttccagccagttaaaaaacgcaccgtcaagaataatgccgtatttgatgacttctgccagcccgctcgctaactcacgcgggggaagcgttttcagacagtcgagatccaccaccacactagcaggttggtagaacgcgccaatcatgtttttaccgaggggatggttgaccgcagttttgccgccaacggaggaatcgacctggctcagtaacgtcgtcgggacttgaatgaaacggacaccgcgctgataactcgccgccgcgaagccggtcagatcgcccactacgccgccgccaagcgccaccagcgtagtatcgcgaccatgcggtttttgtaacaacgccgtaaagacggtatcgagtacagccaggcttttatactgctcgccgtcagggaggataacgctatcgacgttaacacccgcctgttcaagtacgccgcggaccttatcgagatacagaggagccagggtttcgttggtgaccaacatgacctgctcgccgcttttcagcggtaagaaactagctggttcattaaacaaaccagatgcgatggtaattgggtaactacgttccccgagagtaacgacaatcctctccataacgcgacatccaccttaattactgtacccgcagacgagtgtatataaagccagaattagttgctttccagcatgtgaataatctggtttgcaaccactttagcgctttgatcatcagtacgaatggtcacgtcggcaatctcttcatacagcggattgcgttcattggccaacgcttccagaacttcacgcggcggtgtttcaacgtgcagcaacgggcgttttttatcacgctgcgtgcgtgcaagttgcttttcgatggtcgtttcaagataaacgacaacgccacgagcggaaagacggttacgcgtttcacgggatttcacagagccgccgccagtagccagcacaataccctgtttctcggtcaactcattgatgaccttttcttcgcgatcgcggaagccttcttcgccttctaaatcgaaaacccagcccacatcagctccggttcgtttctcaatctcttgatcggaatcgtaaaattccatattgagttgttgagctaactggcgcccaatagtgctttttccggcacccataggcccaaccagaaagatattgcgtttctctgccattttttcggtactactaagactattcgttaatgataaacccgcttcgctcagagagcgccgcaggacatgaactgaaacctcataagatattgcgagagtcagactgaaaattatctcaatactccagcgggtttggcaactgaataaatcacccatccctctgcatatctggtcgctgcaagcgcgctgccttgctaccaccgctctggcgataaatcaccgggtaagattagcgtaaaaaagacagcaaaatgccgcctgaatgataaatcatcatcatggaacgcaggcagcgaagagcaccaactctcaaatcggtactccttgtatgctaaatacctgcgcgcgtcaaatagatgaaacacgttcagcgtaaaaacattaccgcttttacggctgtttactcactggaaaccagtcgtggcgtgataaacaccactaactcgcgtcgttcatcttcttttccgtcatgacgaaatgattgcccgaaccagggaatgtcgccaagcaacggtacgctatcctgaccgcttttatttttacgggtaaaaatgccgcccagcgccaacgtttctccgcttttgacctcgacctgcgtttcgatctcctgcttatcaatcgccagcacttcgccatcggcctgctgtagcacctgccccggaacgttctggctgatgtgtaatttcagccggatgcgacctttttgtaacaccgtgggcgtgacctccatccccaggacggcctctttaaattccacgctcgtcgcgccactttccccgctggaaacctgatatggaatttcgctcccctgtttaatgctggcaggctgaagatgactggccagcagacgcggactggcgataatatccagctgctgtttttgttcgagcgcggaaagctcaagatccagcaagcgtccgttgatgcgcccaatgttaaaaccgacatgcgttgtcgccgtcgctacggagaggtcgctaccaagcgtggtgacttgcccaacgccaccagcgtgttgcgcatcggccagcgtccatttcacgcctaactcacgcaaacttttttcattaatggtgacaatatgcgcgctcagctcaacctgcccgaccggcagatccatttgcgctacccactgttcaagcgcgcttaacgccgttttgttatctcgtagcaaaaggcgattggtgcgtttatcgacggtcatactccctttggcactcagcagcttctcccccgctttcgccagttctcccgcgtcggcgtattgcagggttatactgcgattttccagcggcagatttgcctgcgcccgcgcctgctccgcctcctggcgggcgatattgttattctgccaggcaatggaatgcacactgagaatgttgccttcctgccgcgttatcagtccggcgcttttcactacagtttgtagtgcctgcttccagggaacatctgttagatgtaagctcaccgtaccgctgacgtctgggctcacgaccaggttcaacttctcctgttcagccagcgcctgcaacacctgagctaccggaacgtcatccaccatcagcgtcactttttgcggctttgccgcctgtacgccgggtatcagcatcaacagtagtgcggctatccattgcttcatttgtatctccttgccgttgccacaaccattgtggcggttcgcagtttgtcccggtacccagcgttagtacgtctggcgtcagctgtaaaattgtccagccgttttccagcacatcgttttgctgcacccgtcgccatttcttttgcccgtcttttattacaccgatgatgcgctcgcctcgccctaccatcccctgatagcgccactggctaagttcgctaatccggcatagatcttccggcggtttaaaagggtcacgcataccggttaaaaggcacaatgcaatacctgccaacaaccagcgtttaaccctcatgcggcgtctccagttgtagcgtgaacaaaagatcatcaccttccacgcttaagctaaaacggctcacgctgacgttgcgctctgccagccgtgtaaatgcgctcggcactgcttcccacagcgttttcaacgccaactcgcctccctgcgcggatggatgccaggaaaccagttgcgcgccggataactgaaaatccagtgggctaaagggcagcgttttttcctcgctgaagggagcggtgtctaccaggcgatacagtgcggcccactgctggtgatgacttgcccgtagtcgaattaatgcgtcgcgctcttcatggtgtgtgctactcagaaaaatgagcgtaactaacatcagcaaccagaatgcccagcaaagctggcggaggcggggacttgtggcgaaccaccagtcaaagaacatgttcatcgctaaccttccttgttaactgatactcaaattgccagcgtccctgcgcatcctgctgcgtggctccccgctgattgagatgaaaagatgcatcctggcggagactcgtttctagtgcgtttaacgcggtaatgcttgttgtcagccccttgatctccagcgttccctgctgccagcttatcgttgtcagccaggcgtgctcgggtaaaagcgccgccagtgcttccagcgcagattgccagtcgcgggtaaattgtcgctggcgctgccgttggctacgctgttcgcgtaactgctgttgctccagcaaacgtggcttcgttatctgtaagctgcgggcgagttgttgttccgcctgaagcaaaactgcgtctatgcgcgcttcggcgctgcctgtcagacgcagtattagcgttatcccgacggccagcagcagaggcgcaacgaacatcagcaaccagaaacgcagaaaagcggtccggcgttgctgtcgccagggcaaaaaattaattggcgggttcatcagtacgccttcccaagcgccagccccagcgcgatggcaaagtctccacctggcggcggtagcggcggctgacgaacagaaacggcctcccagggatcaaatccgccttcgccacatatcgcgacgctttcgggatcaacggataacgctgccgccagctccttcgcgctagtcatccccaccgccagtttgcgcccccagctatagcgcgtcgcccacagccactgttcgttatcacgccaggccagacattgctgatgagaaggtaaaaaaggcaggaatcgctgtaatgcactggcatccggggtgatcgcgctcacatgaacacgcaacctttctgccagagtaagcagcgttgccagctctttgctttgcgcggcagtcacgttataggcgggactgagactgtcttcgctgtaatcgaagcgcagggagtccggatccatatccagctcgcgggccatcgtcccactcagccaggccgtttgctcccgctcaccaagggacatgctcgggcgcggaaaactccgctgtaatgtgcgactggcgggaaacgccaacataatgtgatgacgctgcggcagttcgcgactccacggtaacaacgttttagccagctgctgcgcatcaacaatccgcccatctttgataatgtcgttctccagcggcaaccgccaccagcgttgcaaaaagcattcttttgcgccccgcacgatcgcaaccgctaccgcttcttgctgttgtaaatgcaaaccaatttgccagatcttaaatgccattgtgatgatctccttatcacccgtcactctgacgggtatatcaatgcgtctggcttgcctttatactaccgcgcgtttgtttataaactgcccaaatgaaactaaatgggaaatttccagtgaagttcgtaaagtattttttgatccttgcagtctgttgcattctgctgggagcaggcagcatttatggcctataccgctacatcgagccacaactgccggatgtggcgacattaaaagatgttcgcctgcaaattccgatgcagatttacagcgccgatggcgagctgattgctcaatacggtgagaaacgtcgtattccggttacgttggatcaaatcccaccggagatggtgaaagcctttatcgcgacagaagacagccgcttctacgagcatcacggcgttgacccggtggggatcttccgtgcagcaagcgtggcgctgttctccggtcacgcgagtcaaggggcaagtaccattacccagcagctggcgagaaacttcttcctcagtccagaacgcacgctgatgcgtaagattaaggaagtcttcctcgcgattcgcattgaacagctgctgacgaaagacgagatcctcgagctttatctgaacaagatttaccttggttaccgcgcctatggtgtcggtgctgcggcacaagtctatttcggaaaaacggtcgaccaactgacgctgaacgaaatggcggtgatagccgggctgccgaaagcgccttccaccttcaacccgctctacagcatggatcgtgccgtcgcgcggcgtaacgtcgtgctgagccggatgctggatgaagggtatatcacccaacaacagttcgatcagacacgcactgaggcgattaacgctaactatcacgcgccggagattgctttctctgcgccgtacctgagcgaaatggtgcgccaggagatgtataaccgttatggcgaaagtgcctatgaagacggttatcgcatttacaccaccatcacccgcaaagtgcagcaggccgcgcagcaggcggtacgtaataacgtgctggactacgacatgcgccacggctatcgcggcccggcaaatgtgctgtggaaagtgggcgagagcgcgtgggataacaacaagattaccgatacgctgaaggcgctgccaacctatggtccgctgctgcctgccgcagtcaccagcgccaatcctcagcaagcgacggcgatgctggcggacgggagcaccgtcgcattgagtatggaaggcgttcgctgggcgcgtccttaccgtagcgatactcagcaaggaccgacgccgcgtaaagtgaccgatgttctgcaaacgggtcagcaaatctgggttcgtcaggttggcgatgcatggtggctggcacaagtgccggaagtgaacagcgcgctggtgagcatcaatccgcaaaacggtgccgttatggcgctggtcggtggctttgatttcaatcagagcaagtttaaccgcgccacccaggcactgcgtcaggtgggttccaacatcaaaccgttcctctacaccgcggcgatggataaaggtctgacgctggcaagtatgttgaacgatgtgccaatttctcgctgggatgcaagtgccggttctgactggcagccgaagaacagtccaccgcagtatgctggtccaattcgcttacgtcaggggctgggtcagagcaaaaacgtggtgatggtacgcgcaatgcgggcgatgggcgtcgactacgctgcagaatatctgcaacgcttcggcttcccggcacaaaacattgtccacaccgaaagcctggcgctgggtagtgcgtccttcaccccaatgcaggtggcgcgcggctacgcggtcatggcgaacggcggcttcctggtggacccgtggtttatcagcaaaattgaaaacgatcagggcggcgtgattttcgaagcgaaaccgaaagtagcctgcccggaatgcgatattccggtgatttacggtgatacgcagaaaagcaacgtgctggaaaataacgatgttgaagatgtcgctatctcccgcgagcagcagaatgtttctgtaccaatgccgcagctggagcaggcaaatcaggcgttagtggcgaagactggcgcgcaggagtacgcaccgcacgtcatcaacactccgctggcattcctgattaagagtgctttgaacaccaatatctttggtgagccaggctggcagggtactggctggcgtgcaggtcgtgatttgcagcgtcgcgatatcggcgggaaaaccgggaccactaacagtagcaaagatgcgtggttcagcggttacggtccgggcgttgtgaccagcgtctggattggctttgatgatcaccgtcgtaatctcggtcatacaacggcttccggagcgattaaagatcagatcagtggttacgaaggcggtgccaagagtgcccagcctgcatgggacgcttatatgaaagccgttcttgaaggtgtgccggagcagccgctgacgccgccaccgggtattgtgacggtgaatatcgatcgcagcaccgggcagttagctaatggtggcaacagccgcgaagagtatttcatcgaaggtacgcagccgacacaacaggcagtgcacgaggtgggaacgaccattatcgataatggcgaggcacaggaattgttctgattaaaaaggcgcttcggcgccttttcagtttgctgacaaagtgcacttgtttatgccggatacggcgtgaacgcgttatccggctaacaaaatcgtgaaaactcaataaattgcagaaaccccataagcctgataaacattgtgcatcaggcaaacttcacgcatttacactcgcccctgccctttcaaccattcgcgcacgaggaacagcgcactgacattgcgcgcttcattgaagtcagggtcttccagccaatccatcatatgcgccagcggccagcgcacctgtggtagcggctctggctcatcgccttccagactttccgggtagagatcttgcgctaccacgatattcattttgctggaaaagtaagacggtgccatgctgagcttcttcaaaaaagtcagatcgttcgctccaaatccaacctcttcttttagctcgcggttagcggcttcgtagacgctttcacccggatcaattaatcctttgctaaaacctaattcgtaggattcagttcccactgcgtattcgcggatcaggatcaggtgatcgtccacaatcggcacaatcatcactgcttcccggttggttggacgcattcgttcataaacacgccgcacgccattgctgaactccagatccacgctctcgacggtaaacagtcgggaacgggctacagtttcaacattcagaatggtgggtttttgtaaacttttgctcatcgtgggatctatgctgtgaaatcagcggttattgtgcgatatcggacacgctttcggcaatgtgaattgcatgttatttacatttatgtaacttaataaataatcgtcctcaaatcaaattaaaagtcaataggttgaaataactccaggaatttgctgatattccgccttcagagggtttgctatgatcagcggttactgtgatgtgcttaatgatgctcaagttaaactccacgcttgccgatagccaaccgcagaatcatgtattgtgtccggtgcgactgaccacgcctgacagactaagtaagatggggaaagcatgagcaccattgtgatttttttagctgctttgctggcctgcagtctacttgcgggatggctgataaaagtgcgatccagacggcgtcagctgccctggaccaacgccttcgcggatgcgcaaacgcgtaaactcacacctgaagaacgtagcgccgttgaaaattatcttgagagcctgacgcaggtattacaggtgcctggcccaacgggagccagcgcggcaccgatctctctggcgctgaatgccgaaagcaacaacgtcatgatgctgacacacgctatcacgcgttacggcatctctaccgacgatccgaataaatggcgttactacctcgatagcgtagaagtccacctgccccctttctgggaacagtacatcaacgatgagaataccgttgaactgattcataccgatagcctgccgctggttattagtctcaacggtcatacgctgcaggagtacatgcaggaaactcgcagctatgccttgcaacctgttccgagtacgcaggcgagcattcgcggggaagagagtgagcaaatcgagctactcaatattcgcaaagaaacgcatgaagaatatgcgctgagtcgtccgcgcgggctgcgtgaagcgttgctgatcgtcgcctccttcctgatgttctttttctgcctgattaccccggatgtatttgttccgtggctggcaggcggcgcgttactgctgctgggcgcaggtctgtgggggctattcgcgcccccggcaaaatcctccctgcgggaaattcattgtctgcgcggtacaccccgtcgttggggattgtttggcgaaaacgatcaggaacagatcaacaatattagtctcggtattatcgacctggtctatcccgcacactggcagccatacattgctcaggatctcggtcaacaaaccgatatcgatatctatctcgaccgccatgtagtgcgtcagggacgatatcttagcctgcatgatgaagtaaaaaactttccgttacagcactggctgcgcagtacgattatcgctgcgggcagcctgctggtgctgtttatgctgttattctggatcccgctggatatgccgctgaaattcactctcagttggatgaaaggcgcgcagaccattgaagccactagcgtaaaacaactggctgacgctggcgtgcgggtaggcgatacattgcgtattagcggtacgggaatgtgtaatattcgaacttccggaacctggagcgcgaaaaccaatagtccttttttaccgtttgactgcagccagatcatctggaacgacgcccgcagtttgccattaccagaatctgaactggtcaacaaagcgacggcattgactgaagcagttaatcgccagctgcaccctaaaccggaagatgaatctcgcgtcagtgccagtttacgtagtgcaattcaaaaatccggcatggtattgcttgatgattttggcgacattgtactgaagacagcggatttatgttctgccaaagatgactgtgtgcgactgaaaaatgcgctggtcaatctcggcaacagtaaagactgggacgcgctggtaaaacgcgccaacgccgggaagctcgatggcgtgaatgtgttattacgcccggtgagtgcggaaagcctggataacctggtggcaacctccaccgcgccgtttatcacgcatgaaacggcgcgagcggcacaaagtctaaacagtccggcccccggcggattcctgattgtcagcgacgaaggcagcgattttgttgatcagccctggcctagcgcaagtctttacgactacccgccgcaagaacagtggaacgctttccagaaactggcacaaatgctgatgcatacgccgtttaacgccgagggtatcgtcacaaaaatcttcactgacgccaatggtacgcagcatattggccttcatccgatcccggatcgttccggcctgtggcgctatctcagcaccacattgctgctactgacgatgctgggtagcgccatttacaatggcgtacaggcctggcgtcgttaccagcgtcatcgcactcgcatgatggagattcaggcctattatgaaagctgcctgaacccgcaactgatcacccctagtgaaagccttatcgaataacacgtttgcgcggcaggttatgctaccctgtcgcgcaaattgcttcactctggagatttccctcatgcatatcaacattgcctggcaggacgtagataccgttctgctggatatggacggcacgttgctcgacctcgccttcgataactatttctggcaaaagctggtgcctgaaacatggggcgcgaaaacggggttacgccacaggaagcgatggaatatatgcgccagcaatatcacgacgtacagcatacgctaaactggtactgtcttgattactggagtgagcaactgggtctggatatctgtgcgatgaccaccgagatgggaccgcgtgccgtactgcgtgaagataccattccgtttcttgaggcactgaaagccagcggtaagcagcgaattttgctcaccaatgcgcatccgcacaacctggcggtaaaacttgagcataccggtctggacgcacaccttgatttattactttccacccacacatttggttatccgaaagaggatcagcggttatggcatgcggtggccgaagctacgggtctgaaagctgaaagaacgctgtttattgatgacagcgaagcgattctcgatgctgccgcgcaatttggtattcgttactgcctcggcgtgactaatcctgattccgggattgccgagaaacagtatcaacgccatccgagtctgaatgactaccgccgcctgatccccagcctaatgtgaaggagacgccatgaaagagaaacctgctgttgaggttcgactggataaatggctatgggctgcccgtttttataaaacccgcgcgctggcccgtgaaatgattgaaggcggtaaggtgcattacaacgggcagcgcagcaagccgagcaaaatcgtcgagctgaatgccacgctcactctgcgccagggaaatgacgaacgcacggtgattgtaaaggcgattactgaacagcgtcgccccgccagcgaggcagccttgctgtatgaagagactgcggaaagtgtagagaaacgcgaaaaaatggcgctggcacgtaaacttaatgccttaaccatgccgcacccggaccgacgcccggacaaaaaagagcgccgcgacctgttacgatttaaacacggcgacagtgaataactgtcacctgcaagagagatgattatgccgcaacatgaccaattacatcgctatctgtttgaaaactttgccgtgcgcggcgaactggtaaccgttagcgaaaccctgcaacagatccttgagaaccacgattatccgcagcccgttaaaaacgtgctggcagaactgctggttgcgaccagcctgttaaccgctacgctgaagtttgatggtgatatcaccgtacagctgcagggcgacggtccgatgaatctggcggttattaacggtaacaataaccagcagatgcgcggtgtggcgcgcgtgcagggcgaaattccagaaaatgccgacctgaaaacgctggtcggcaatggttacgtggtgatcaccattaccccgagcgaaggcgaacgctatcagggcgtagttggtctggaaggtgataccctggcggcctgcctggaagattactttatgcgttctgaacagctgccgacgcgcctgtttattcgcaccggcgacgtagacggcaaaccggctgcaggcggtatgttgttgcaggtaatgcctgcgcaaaatgcccagcaggacgactttgaccacctggcgacgctaaccgaaaccatcaaaaccgaagaactgctgaccttaccggcaaacgaagtgttgtggcgtttgtatcacgaagaagaggtgacggtttacgatccgcaggatgtggagttcaaatgcacctgcagccgtgaacgttgcgccgatgcgctgaaaacgctgcctgatgaagaagttgatagcatcctggcggaagatggcgaaattgacatgcattgtgattactgcggtaaccactatctgttcaatgcgatggatattgctgaaatccgcaacaacgcgtctccggcagatccgcaagttcattaatgagtatgtccggcagagagggctctgccggattttacgactaatacacctgatgcgctttgtcactcattcagattcacattcagcctttcaccatccactacaagatcgcgccacgctttaggcttcgtccccagttttccatccttcgcagctgtgagtaatttttctttcgttatttcgttcggaagtaaactcatatcaagcgcgtcccattcttttctgtcactgtcaaagccatagacaatgactctgtcatcattaaaagcaaacaggatccgctccgcctgaccatcactattcagatcttgctcgaccaggacgcaggcgtctttttcaatacaggtcatcacgttatagcgatcctggattaaggcgctccagaatgtcgcatcaggtttaacagaaccaggggcaattaacacattatcggctaatactttttcgcttacctgttgctgaagatgttgctctccatctaacgccatcagcagatcccgcgcgcgtttcgggtctttcataaacccggcatcgcttttcaggctctcaagcgcagcacgtccatagcgaccgctctgctcgagcatgtagatagttacctggtcactcgtgtttttgccgctctgataacgcgccatatggctgttcacgctaatgcgcatactgtccagcaccgggctattaagaagcaccagtatcaccaacaccaataagctaaccgcaaggttcactttgccctgaagaacaacgggattttgccctttacgccagacgatgctgacaaaataccccaggctccacaccagtaacaccagcaccgccagcacgccctgcaagcggtcgacagtccagccgtactgagcgacccgcagccataacgcccaggcggcgacgaacacatacagcggagcaaccagcaaagcggttttaatcaggcaacgcaacggccctgtccagggaagactcgctttttgcggatcgcggacaatagccattaagatcaattgcaaaaaggccagcgtcaacagcaacccggcggcggagatgtggcgagaaatcgcgctcaggcccgtaaacggcagggtgatgataaacatcagggttagcaaacttactaacggcagcaaccccgtggcgattaacgtgaacaacttttgaatagagtcgattaaacgactctgtgttcgcgcgaggatcaccgccagcgcggtaaccagacctaacgtgagataaataaaccagtcggttgcaaaaaagagcgtattgaaaaacgtgatgccaacaagtttaaacaactcactccacagtaaaagcaccagccacgtcaagccattggcgagaaaaatcaccagtaatataagtacgttatgccatacactctggtaaaaatagcgatagcggctactgtcattgcggatgcgaaggctttgttgtatccacggtagcaacaacattgccatcaacagcagatagcaaccaaaatcccaaagcgccttttcagctctccaggggttcatgccatcagtttgccacttcagccagccgctcatccccagcgtggcaataaacactagcgccagccatccccaaaggcgcttctgtttaaaagagatcacggagaagagtaaaacggaactaaacgcgacggtcgcaggcacgccataaacaatccaactgtgattttttccggaaagccaggcgatcagcaggtagcaaaccagaccctgaagtaatccggtagcaatcatcccccagcgtgttgcgggactaagttcaacgttatccatgttggttatccagaatcaaaaggtgggttaattatcgcatccgggcagtagtattttgcttttttcagaaaataatcaaaaaaagttagcgtggtgaatcgatactttaccggttgaatttgcatcaatttcattcaggaatgcgattccactcacaatattcccgccatataaaccaagatttaaccttttgagaacattttccacacctaaaatgctatttctgcgataatagcaaccgtttcgtgacaggaatcacggagttttttgtcaaatatgaatttctccagatacgtaaatctatgagccttgtcgcggttaacacccccaaaaagactttactattcaggcaatacatattggctaaggagcagtgaaatgcgcgttaacaatggtttgaccccgcaagaactcgaggcttatggtatcagtgacgtacatgatatcgtttacaacccaagctacgacctgctgtatcaggaagagctcgatccgagcctgacaggttatgagcgcggggtgttaactaatctgggtgccgttgccgtcgataccgggatcttcaccggtcgtagtccaaaagataagtatatcgtccgtgacgataccactcgcgatactttctggtgggcagacaaaggcaaaggtaagaacgacaacaaacctctctctccggaaacctggcagcatctgaaaggcctggtgaccaggcagctttccggcaaacgtctgttcgttgtcgacgctttctgtggtgcgaacccggatactcgtctttccgtccgtttcatcaccgaagtggcctggcaggcgcattttgtcaaaaacatgtttattcgcccgagcgatgaagaactggcaggtttcaaaccagactttatcgttatgaacggcgcgaagtgcactaacccgcagtggaaagaacagggtctcaactccgaaaacttcgtggcgtttaacctgaccgagcgcatgcagctgattggcggcacctggtacggcggcgaaatgaagaaagggatgttcagcatgatgaactacctgctgccgctgaaaggtatcgcttctatgcactgctccgccaacgttggtgagaaaggcgatgttgcggtgttcttcggcctttccggcaccggtaaaaccaccctttccaccgacccgaaacgtcgcctgattggcgatgacgaacacggctgggacgatgacggcgtgtttaacttcgaaggcggctgctacgcaaaaactatcaagctgagcaaagaagcggaacctgaaatctacaacgctatccgtcgtgatgcgttgctggaaaacgtcaccgtgcgtgaagatggcactatcgactttgatgatggtagtaaaaccgagaacacccgcgtttcttatccgatctatcacatcgataacattgttaagccggtttccaaagcgggccacgcgactaaggttatcttcctgactgctgatgctttcggcgtgttgccgccggtttctcgcctgactgccgatcaaacccagtatcacttcctctctggcttcaccgccaaactggccggtactgagcgtggcatcaccgaaccgacgccaaccttctccgcttgcttcggcgcggcattcctgagcctgcacccgactcagtacgcagaagtgctggtgaaacgtatgcaggcggcgggcgcgcaggcttatctggttaacactggctggaacggcactggcaaacgtatcagcattaaagatacccgcgccattatcgacgccatcctcaacggtagcctggataatgcagaaaccttcactctgccgatgtttaacctggcgatcccaaccgaactgccgggcgtagacacgaagattctcgatccgcgtaacacctacgcttctccggaacagtggcaggaaaaagccgaaaccctggcgaaactgtttatcgacaacttcgataaatacaccgacacccctgcgggtgccgcgctggtagcggctggtccgaaactgtaatgatttgaagctggagaatatctatccagtatcttatagaaagcaaaacgggaggcaccttcgcctcccgtttatttacccttcttttgtcgtgccctgcgcccgcgttaccggcactggcagccaggcgcgaatggaaagcccgccccgctcgctggtgccaagctccagcatcccgttatggttatccacgatacgctgcacaattgccagccctaatcccgtgccgctaatggtgcgcgcactgtcgccgcggacaaacggctggaacaggtgcttacgttgttccggcgcaattcccggaccgtcatcttccacctggaaccaggcgcgattcggctccgttccgctgctgactttgatccagccattgccataacgggcggcgttgaccaccatattcgccaccgcgcgtttgatgctcagcgggtgcattttcacttcaatgctgccggggtaaagcgcggtttcaatttcccgctcatagccactttcggcagcaatcacctcaccgagtactgcattaagatccgccatttccatcggcatctcctgcccggtgcgcaggtagtcgataaactgctcaatgatggcgttgcactcttcgatatctttattgatgctttctgccagatagccatcctgctcgctcatcatctcagtcgccaggcgaatacgcgtcagcggcgtgcgcaagtcgtgacttacccccgccatcagcagcgtgcggtcatccgccagttgcttaacaccagccgccatatggttaaaggcacgggtaacggaacgcacctcgctagcgccatactcacgcagcggcggcggaataatccctttaccaacctgcaaggctgcgtgttcgagatcgaccaacggtcggttctggatacgaataaacagccacgccccgcctatcgccaatagcataatcgccagcgtatagcggaacagcggagagaaatcgccctgatgaatttcggtcagcggcacgcgtacccagatattggggctcagccaggttttcagccagacgacagggctacttttgttgacctcaacgcgcacttccgtcgggccgcccagttgctgcgccatctgatggcttaagaattcatagtgttgcgcccaacgcagacctgcctcttcggcagcctcgttggagtagagagagatccccagctcacggtagatctcccgacggaaagcgggaggcacaaccaactgcgtgccgtcctccagttgcagtttgtcggtcatcaacatacgcacttcgtacgcgaggactttattaaactgctggaggctcggcaaaatcgcgaagttcagcaccaccagataagtcgtcaccaggctggcgaacagcaaggtgacgatgagcaataacgtacgggcaaaactacttcgtgggctgaagcgcaatcgcctcatgctttagagccgtccggtacaaagacgtagcccagaccccagacggtctgaatgtaacgcggatgcgctggatcttcttccaccatgcggcgcagacggctaatctgcacgtcgatggagcgttccattgcggaatattcacgaccacgggcaaggttcatcagcttatcgcgggagagcggctcacgcggatggctgaccagtgccttcagtaccgcaaactcaccgctggtgagcggcatcggctcgtcttcgcggaacatttcgcgcgtaccgaggttaagtttgaacttaccgaaagcaattaccgcctcttcctgactcggtgcgcctggcagttcgttcgcctgacgacgcagcaccgcacggatacgggccagcagttcacgcgggttaaacggttttggaatgtagtcgtcagcgccaatctccaggcctacgatacggtccacttcttcccctttcgccgtcaccataatgatcggcatcgggttgctctgactacgaagacgtcggcaaatgctcaagccatcttcaccaggtaacattaaatccagtaccataagatggaaagattcacgagtcagcaggcgatccatctgttctgcattagcgacgcttcgaacctggaagccttgttcggtgagataacgttccagcagcgcacgcaggcgcatgtcgtcatcgaccaccagaatcttgtagttctcttgcattgtttgtactcccaaaggttcgcaacaatttgtaagcgtgtattcttaaaaaagctcacgttcgtcaccagctaaatctggtatgaatttcagcctaaattgttacaaagcatattaaacagcagcttaagtatacaatttattcggcgaaacattattgattctgttgatatgatcacgttatacccaatgtgcgcattatcaaacagacaaagggaatcaacgagatgaaaacgcccctggttacccgggaagggtatgaaaaactcaaacaagagcttaattatctctggcgtgaagaacgcccggaggtcacaaaaaaggtgacctgggccgcaagtctgggcgaccgcagcgaaaatgctgactatcagtataataaaaagcgtctgcgtgaaatcgaccgtcgcgtgcgctatctcactaaatgcctggaaaatctcaaaatcgtcgattactcccctcagcaggaaggcaaagtcttttttggcgcgtgggtggagattgaaaacgacgatggcgtgactcaccgtttccgtattgtcggctacgatgaaatttttggccgtaaagattacatctctatcgattccccgatggcccgcgcattgctgaaaaaagaagtcggcgatctggcggtggtgaatacccctgccggggaagcgagctggtatgttaatgctatcgagtacgtgaaaccgtaaggaagagtcttaacctcctgccgatggctggcatttttgccagccagtccgtataactatcccctgatttttgatccgaaaagatgaactcaaaccatgatgaatgatagcttctgccgcattattgcgggtgaaattcaggcgcgcccggaacaggttgacgctgccgttcgcctgcttgacgaagggaataccgtgccgtttatcgcacgttatcgtaaggaaatcaccggcggtctggatgacacgcagctgcgtaatctggaaacgcgtctgagctatctgcgcgagctggaagagagacgtcaggcgatcctcaagtccatttccgagcaaggcaaactcaccgatgatctggcgaaggccatcaacgccaccctaagcaaaaccgaactcgaagacctctacctgccctacaaacctaaacgccgcacccgcgggcaaatcgccattgaagcagggcttgagccgttggctgacctgctgtggagcgatccgagtcacacgccagaagtcgccgctgcacaatatgtttatgccgataaaggcgtggcagataccaaagccgcgctggatggcgcgcgctatatcctgatggaacggtttgccgaagatgccgcgctgctggcgaaagtgcgtgattatctgtggaagaacgcgcatttggtttctacggtggtgagcggtaaagaagaggaaggggcgaaattccgcgactatttcgatcatcacgaaccgttgtccacggtgccttctcaccgcgcgctggcgatgttccgtgggcgtaacgaaggcgtacttcagcttagcctgaatgccgatccacagttcgatgagccgcccaaagagagctattgcgagcaaatcatcatggatcaccttggcctgcgcctgaacaatgccccggcggatagctggcgcaaaggcgtggtgagctggacgtggcgcatcaaggtgctgatgcatctggaaaccgaactgatgggcaccgtgcgcgaacgtgcggaagatgaagcaatcaacgtctttgcccgtaacctgcacgatctgctgatggcggcccctgccggactgcgtgcaacgatgggcctcgatccgggtctgcgtactggggtaaaagtggcggtggtcgatgccactggcaaactggtggcgaccgacaccatttacccgcacaccggacaggccgcaaaagcagcgatgaccgttgctgcgctgtgtgaaaaacataacgttgaactggtagcgatcggtaacggtacagcttcccgcgaaactgagcgtttctatctcgatgtgcagaagcagttcccgaaagtgaccgcgcagaaagtaatcgtcagcgaagcaggcgcgagcgtttacagcgcttccgagctggctgcacaggagttcccggatctcgacgttagcctgcgtggcgcggtgtctatcgcccgccgtttgcaggatccgctggcggagctggtgaaaatcgatccgaaatctatcggcgtaggtcagtatcagcatgacgtcagccagacgcaactggcccgcaaactggacgcagtagtagaagactgcgtaaacgccgttggcgtcgatctcaacactgcttctgttccgctgttaacccgcgtggcgggcctgacgcgcatgatggcgcaaaacatcgttgcctggcgcgatgagaacggtcagttccagaaccgtcagcaactgttaaaagtgagccgtctggggccgaaagccttcgagcagtgcgcgggcttcttgcgcattaaccacggtgataacccgctggacgcgtctaccgttcacccggaagcctatccggtggtggaacgcattctggcagcaacacagcaggcactgaaagatctgatgggtaacagcagcgaactgcgtaacctgaaagcgtctgactttactgatgagaaattcggtgtgccgacggtaaccgacatcatcaaagagctggaaaaaccgggtcgcgatccgcgtccggaatttaaaaccgctcagtttgccgatggcgtcgagacaatgaacgacctgcaaccgggtatgatcctcgaaggcgcagtgaccaacgtcaccaactttggcgcgtttgtcgatattggcgtgcatcaggacggcctggttcacatctctagtttgagcaacaagtttgtggaagatccgcataccgtggtgaaagcgggcgacattgtgaaggtgaaagtgctggaagtggatcttcagcgtaaacgtatcgccctgactatgcgcctggatgagcagcctggcgaaaccaacgctcgtcgcggcggcggtaatgaacgcccgcaaaacaaccgcccggcagccaaaccacgcggtcgtgaagcgcagcctgccggtaatagcgcgatgatggatgcgctggcggcggcaatgggcaaaaaacgttaaacgcccgtactggcctacggttcgaatttgcacgaaatcgtagggcagataaggcgttcacgccgcatctggcaacgaacgccttgcctgacataaaagtgccggagaatatctccggcatttttattccacagccaaactcataatatattccggcaatatttatcatttcattaacaactgaaaccttaattaaacattagccagtccgggtaattcactattcgaattatattttcgctgcgatataaccttgagccacatcaacattgagtcagattattattcaaaccaacattcgcacacattttaagtattgctgatagaaaccattctcattatcattgtgttgttgattatttaatctctcctttgttggcaaatcatctggtctcatgtcgctgtcaaacgccccatgaggtagttatccagttaatgagaaacaagtaggcacctatgcaatacactccagatactgcgtggaaaatcactggcttttcccgtgaaatcagcccggcatatcgccaaaaactgctttctcttggcatgttacctggctcctcttttaatgtggtgcgcgtcgctccactcggcgaccccattcatatcgaaacccgtcgtgtgagcctggtattacgcaaaaaagatctggccttattagaagtggaagcggtttcctgttaatacggtgataacaacaatgaaaaaattaaccattggcttaattggtaatccaaattctggcaagacaacgttatttaaccagctcactggcagtcgtcagcgtgtaggtaactgggctggcgttaccgtcgaacgtaaagaagggcaattctccaccaccgatcatcaggtcacgctggtggacctgcccggcacctattctctgaccaccatcagtagccagaccagcctcgatgagcaaatcgcctgtcactacattttgagtggcgacgccgacctgctgattaacgtggtggatgcgtctaaccttgagcgtaacctgtacctgacgctacaactgctggaactcggcattccctgcattgtggcactgaacatgctcgacattgccgagaagcaaaatattcgtattgaaattgatgctctgagcgcgcgtctgggctgtccggtgatcccgctggttagtacccgtggtcgcggtattgaagcgctcaagctggcgattgatcgctataaagctaacgagaatgtggaactggtgcattacgcacagccgctgctcaacgaagcagatagtctggcaaaagtgatgccttccgacatcccgctgaaacaacgtcgctggctgggcctgcaaatgctggaaggcgatatctacagccgcgcctacgccggtgaagcgagccagcatctggatgccgccctcgcccgtctgcgtaatgagatggacgatccggcgctgcacattgccgatgcgcgttaccagtgcattgctgccatctgtgatgtggtaagcaacaccctgacggcagaacccagccgtttcaccactgcggtagataaaatcgtgctcaaccgtttcctcggtctgccgattttcctctttgtgatgtacctgatgttcctgctggctatcaacatcggcggggcgttacagccgctgtttgacgtcggctccgtggcgctatttgtgcatggtattcaatggattggctacacgctccacttcccggactggctgactatcttcctcgcccagggcctgggtggcggcattaacaccgtgctgccactggtgccgcagattggcatgatgtacctgttcctctccttccttgaggactccgggtatatggcgcgtgcggcgtttgtgatggaccgtctgatgcaggcgctgggcttgccggggaaatcctttgtgccgctgatcgtcggtttcggttgtaacgtaccgagcgtaatgggtgcacgtacgcttgatgcaccgcgtgaacgtctgatgaccatcatgatggcaccgtttatgtcctgcggcgcgcgtctggctatcttcgcagtattcgcggctgccttcttcgggcagaacggtgcgctggcggtcttcagcctgtatatgctgggtattgtgatggcggtgctgactggcctgatgctcaagtacaccatcatgcgcggtgaagcgacgccgtttgtcatggagttgccggtctatcatgtaccacacgttaaaagcctgattatccagacctggcagcgtctgaaaggcttcgttctgcgtgctggtaaagtgatcatcatcgtcagcattttcctgagcgctttcaacagcttcagcctgagcgggaaaatcgtcgataacatcaacgacagcgcgctggcgtccgtcagccgggtgatcaccccggtcttcaagccaattggcgtgcatgaagataactggcaggcaacggttggcctgtttacaggtgccatggcgaaagaagtggtagtgggtacgctcaacaccctctacaccgcagaaaatattcaggacgaagagttcaatccggcagaatttaacctcggtgaagagctgttcagtgcgatagatgaaacctggcagagcctgaaagacaccttcagccttagcgtactgatgaaccccattgaagccagcaaaggcgacggcgaaatgggtaccggggcgatgggcgtgatggatcagaaattcggtagcgcagcagcagcttacagctacctgattttcgtcctgctgtatgtaccatgtatcagcgtgatgggggctatcgcccgtgaaagtagccgtggctggatgggcttctccatcctgtgggggctgaatatcgcttacagtctggcaacattgttctatcaggtcgccagctacagtcagcatccaacttacagcctggtgtgcattctggcggttatcctgtttaacatcgtggttatcggtctgctgcgccgcgcgcgtagccgggtggatatcgaactactggcaacccgcaagagcgtaagcagttgctgcgcagccagcaccaccggtgattgccattaatggctagtcttattcaggtgcgcgatttgctggcgttacggggccgtatggaagcggcccagataagccagacattgaacactccacagccaatgattaacgccatgctgcaacaactggaaagtatgggcaaagccgtgcggattcaggaagaacctgacggctgcctctctggcagttgtaaaagctgcccggaaggaaaagcctgtctgcgcgagtggtgggcgctgcgttaaccttactccatcgcctgttttggaaagcccggtatgcgtctgcatccgggcttttttgcgtgcggctttccataaaaatgcaactcttgcagcacggcgtaagttcctttgaaagcatctcgcagggatgaaaactcgctaatacacaggtgtggagtggcgcgtagagtcgcggcattcaaacaacaggtgaaggaacgccatgagcaaaaagcagagttccaccccacacgatgcgctgttcaaactctttttacgccaaccggacacggctcgtgattttcttgcgtttcatttaccggcacccattcacgcgctttgtgatatgaaaaccctcaagctggagagcagcagctttattgatgacgatctgcgtgaaagctattccgatgtgctgtggagcgtgaaaacggaacaaggaccaggatacatctattgtctgattgaacatcaaagcaccagtaacaaactgatcgcatttcgcatgatgcgttacgctattgccgcaatgcaaaatcaccttgatgctggatacaaaacgttgccgatggtggtgccattgttgttttaccacggtattgaaagcccctatccctatagcctgtgttggctggattgtttcgccgatcccaaactggcaaggcagctttatgcctccgcatttccgctgattgatgtcaccgtcatgcctgatgatgaaatcatgcagcaccgacgtatggcgctgctggagttaattcaaaaacatattcgtcaacgcgacctgatggggctggtagagcaaatggcctgcttattaagtagtggatacgctaatgacagacaaatcaaagggctgtttaattacatactgcaaactggcgacgctgtacgttttaacgattttatcgacggcgttgccgaacgtagtccgaaacacaaggagagtttaatgactattgcggaaagattgcggcaggagggggaacaatccaaagccctgcatatagccaaaataatgcttgaatccggagttcctcttgcagacatcatgcgctttaccgggctgagtgaagaagagttggctgcggcgagtcagtaaagttctgtctcgccatttcaaaagccacttacaccctctgcttcaacgccaccagcaggtgacaaaactcggccggatggctaataaatggcgcatgggccgctttggcgaagatataactttcgctgtgaggccaaagtttatccagcatcggcaccactttgcgcggcaccagaccgtcgagatagccatacaatcgcaaaaacggcatggacacgttttgcagcggctgacggagatcgaccgttttcaggatttccagcccgccattaagcacgtcaacctccggcatcggtaacgccagaacggttttcttcaacgcccgcgcatcctggcgcgccgtttcagtccccatggtttgtaacgccaggaaccgctccactgtacgctgaaaatcatcactgagttgctgctgaaatcccgccagcacgtccggttttatccccggccactcgtcacgagcactaaaacaaggactgctcgccacggtgaccagcgcctgaacacgctcgggatgggttaacgcaatctggcttgccaccagcccgcccagactccagcctaaccaaatggctttatcaggtgcctgttgcagcacggcttcggccatatcagcaagactcagcgcaccaaatccccggctacgcccgaagccgggcaggtcaacaaggtgcagcgtaaaatggctgctaagttcctcgtcaatgcaacgccacacttcggcattcagtccccatccgtgcagcagcacaagatgaacattcccctgacctttggtctgccaccagatgttattcatccgctattgttctcttttgacttacaaggatgaacatatgctaacagtaccgggattatgctggctatgccgaatgccactggcgttaggtcattgggggatttgtagcgtctgtagtcgcgccacccgcacagataaaacgttatgcccacaatgtggattacccgccacacactcccatcttccctgcggtcgctgcctgcaaaaaccgccgccctggcaaagactggtcacggttgccgactatgcgccgccgttaagtccgcttatccaccagcttaaattttcccggcgcagtgaaatcgccagcgccctgagtcgtctgttactattggaagtcttacacgctcgtcgcaccaccgggttgcaattgccggatcgcatcgtcagcgttccgttatggcagcggcgtcactggcgtcggggatttaatcagagcgatttgctgtgtcagccgttaagtcgctggttgcactgccaatgggatagcgaagccgtcacacgtacacgggccactgcgacccagcattttctcagtgcccggctgcgcaagcgcaacctgaaaaatgcctttcgtcttgaattgcccgtgcaaggtcgccatatggtgattgtggatgatgtcgttaccaccggaagtaccgtcgcagagattgcgcagttgcttttacgcaatggtgcggcggctgtccaggtctggtgcctttgtcgaaccttgtaaagcctcgatgatgggcgtattataaccaactaaaatagtcaactattaggccattactatgatccgtatttccgatgctgcacaagcgcactttgccaaactgctggcaaatcaggaagaagggacacaaatccgcgtatttgtgattaaccctggcacgcctaacgctgaatgtggcgtttcttattgtccgccggacgctgtggaagccaccgacacagccctgaaatttgacctgctgaccgcgtatgttgatgagttaagcgcaccatacctggaagatgcagagatcgattttgttaccgaccagttgggttcccagttaacgctgaaagccccgaacgccaaaatgcgtaaagtggcagacgatgcaccgctgatggagcgcgtggagtatatgctgcagagccagatcaacccacagcttgctggtcacggtggtcgcgttagcctgatggaaatcaccgaagacggttacgccattctgcaatttggcggtggctgtaacggttgttccatggtcgatgtgacgctgaaagaagggatcgagaagcagctgctgaacgaattcccggagctgaaaggtgtgcgcgatctcaccgaacaccagcgcggcgaacactcctactactaagttatcccctcttttgtagattgcccgatgcgacgctaaagcgtcatttcgggcctacgttgaacatgtgccagacgttggcgcagcattgctttgtcaaatcctcggttcgtttccccgcgataatatgaccaacctctcataatttaaatttaccccgctctggtgattctcaaacgccagatgttacccgtatcattcacatgggtaccaaacatactcctgacatctgactacaataattagttttagtgggtatcagtcgtggtgccgcaatatctctgttcccgattgggataattagagtttgtcgtcagaaaattgacgttacccataacaaatgaaaggccaggtaaatcatgccattagtcattgttgctatcggtgtaatcttgttgttgctcctgatgatccgcttcaaaatgaacggcttcatcgctctcgtcctcgtggcgcttgctgttggattaatgcaaggaatgccgctggataaagttattggctccatcaaagccggtgtcggcgggacgctcggtagccttgccctgatcatgggttttggcgcaatgctgggcaaaatgctggcagactgcggtggcgcacaacgtatcgccaccacgctgattgccaaatttggtaaaaaacacatccagtgggcggtggtactgaccggttttaccgttggttttgccctgttctatgaagtgggctttgtgctgatgctgccgctggtgtttaccatcgcggcttctgcgaatattccactgctgtatgttggtgtaccaatggcggctgcactgtctgtgacccacggcttcctgccaccgcatccgggtccgactgcgattgccaccattttcaatgccgatatgggtaaaaccctgctgtacggtactattctggcaatcccgaccgtgattctcgccggtccggtttacgctcgcgtgttgaaaggtatcgataagccaattccggaaggtctctacagcgcgaaaaccttcagcgaagaagagatgccgagctttggcgtcagcgtctggacctctctggtgccggtagtactgatggcgatgcgtgcgattgccgaaatgatcctgccgaaaggtcacgctttcctgccggtagcggagttcctcggtgacccggtaatggcaacgctgattgccgtgctgattgcgatgttcacctttggtctaaaccgtggtcgtagtatggatcagattaacgacacgctggtttcttccatcaaaatcattgcgatgatgctgttgatcatcggtggtggcggtgcgttcaagcaggtgctggtagacagcggcgtggacaaatacattgcttccatgatgcacgaaaccaacatttctccgctgctgatggcctggagcattgctgccgtactgcgtatcgcgctgggttccgcaaccgttgcggcaatcactgcgggtggtatcgcggcaccgctgattgcaacgacgggtgttagcccggagctgatggttattgcggttggttccggtagtgtgattttctctcatgtgaacgatccgggcttctggctgttcaaagagtactttaacctgactatcggcgagaccatcaaatcctggagcatgctggaaaccattatcagcgtgtgcggtctggtaggctgtctgctgctgaatatggtgatttgataacactgactgccggatgcggcgtgaccgccttatccggcctacgattcgggatgaattagtaggccggataagacgcgtcaagcatcgcatccggcatcaaccgcactttacttcttcttcgctgcagctctgcgccgtctgtccaaatccttcagcaacttgttcacgccatcatcggcaaacatgctctcaagcgttgcggaaagcttgcgtcgccagtttttatactggtaactggtgccaggaatattcaccggttcggccatatccagccagtcttccggctgtagtcctaacagagcactgttactgtcggcaatgtagcgctgcaaaccacggttcagcgtcggcgtcatgctcatcaagcttgccttatgcccggcacgtttcggcagacaaccatatttatgcagtgcatccagcagcccttgcttcgccagttcgcgatcctgatacagaccgcgcagtaccacttcatccggatacagccccagggttttgcccagcgttagatccccgcactcccagtaaccgcgcagcgttggcaggtcatgtgtcgccgcaaccgccatgctctgctccggatacgctttcggtgcacggaacgtcttctcgtggtcgttttcgaaatagagcactttgtaagagtacacaccgctgctgcgcagcttaccgacaatctctaccggtacggtaccgagatcttcaccaatcaccatacagcgatgacgtttactttcgagtgccagaatgctgagcagatcatccaccggatagtgaacatacgcgccctgatctgccgtctcgccatacggtatccaccacaaacgcagcatgctcatcacatggtcaattcgtaatgcgccgcagttttgcatattggcacgcaacagctcgataaacggttcataggcacgcgcggtgatgatatgcgggtccattggcggtaatccccagttctgccccaacgggccgaggatatccggcggcgcgccaacgcttgctttcaggcaatatagttcacggtcacaccaggtttccgccccaccttccgctacgccaaccgccagatcacgatacaagccaatcggcatttcatagccctggcttatctcccagcaggcggcaaactggctgtaagccagccactgcaaccagagataaaaatcgacgtcatcacgatgttcttcgcagaactgacgcacttctggactatccacgttctgatacatctctggccatgcaggccagccccagcgcatttcgtcctctttcacttgctgggcatgtagcgcatcaaaggctgcctgccagaacaggctgtcgccctgctctgcaacaaactggcgaaacgcggccatctgctcatcatcacgttgcgcgaaacctttccacgccattcgtaatgctgtcatttttagggcggtaaccgtggagtaatcgacccagtcggcatcgcgcgcctgttgcagcgtctgttgcgtggtcggcaactgccaccaggcctgagcctcttcgctaagatggaaatcttcaacggcgttaacgtcgatataaatcacattcagccaacggcgagaagacgggctgtatgggctggcgctctccggatttgccggatagagcgcatgaatcgggttcaggccaatgaagctcccgccacgttttgccacatccaccagcatcgctttgagatcgccaaaatccccaataccccagtttttttcgcttcgcagcgtataaagctgaacgcaggcaccccacagcttttgtttattcagcaacgcctgcggttcgtaacagcgtttcggggcgacaatcacccggcaatgcgcgcgctggtcgtcctgggtgagtgtcagcgtgtgataaccttccggcagcttcgtcggtagattgaacgctttgccccccgttacatggcctttgtactgcgttccttcttcggtggtcagcagccagctatattcgccgctgccctccaccaccatcggcatttttttgccgctggtataaaccatgacattcgggactggcgttaccgccactttcgtggcggtacgttgatgcatcgcgtcaagcaaacgccgtttggtttcggcgctaatgctctgcggtttaccgtgggcattgatgtaattggggctaatccccgccgccagcgcggcattatccagacgtttgctttccatcgagcttccttagcgttttgcctgccagatacgagcctgataatcgcgaatagagcgatcgctgctaaacataccgcagcgggcggtattgaggatcgccgcgcgagtccaggcctcctggtcgcggtacagcacatccacctgcttttgtgcctctacataggctgcgaaatccgccatcaccagatacggatcgccgccctgtttgccgatactgtgcagcatctagtcgaaggcatgcttatcgccgtcgctgtatttaccgctttccagctctttcaatactgcgtccagcaccttatctttcttccgccatttcaccgggtcgtagcctttggccagaattgccttcacttgttccacggtatgaccaaaaataaagatattttcttcaccgactttctcggcgatttcaacgttcgccccatccagcgtaccgacagtaagcgcaccattgagcgccagtttcatattgccggtaccggaagcttctttacctgcagtgctaatttgttcggagatatccgccgccgggatcagtttttccgccgcgctaacgcaataatccggcaggaacaccaccttcaacttatcgccaaccagcggatcgttgttgatcacgtcagccactttgttgatcgcaaagataatattcttcgccaggtagtagcccggtgccgctttcgcgccgaagaggaagacgcgcggtacgcgatcagcctgcgggttttcacgaatttctttgtacaacgccagaatatgcagcagattcaggtgctggcgtttgtactcatgcaaacgtttgatctgaatatcgaaaatcgcctgtggattgatctcaataccggtacgaactttcacaaactccgccagacggactttattcgcctgcttgatctcgcgatattgctgacggaatttcgcatcatcagcgaatttttccagattgatcagctgatcgagatcgttagcccactctttttgcagacttttatccaacagagccgccagtgccgggttgcactgtttgatccagcgacgtggggtaataccgttggtgacgttatggaatttgttcggccatagctggtgatattccgggaacagatctttcaccaccagatcgctgtgcagcgccgcaacaccgttcaccgcgaaaccgccaaccacacacaggttcgccatatgcacttgtttgtcgtgcaccaccgccagtttggcccacactttttcatcgcccggccaggttttctctaccagcgttttaaagcgagtattaatttcgttaataatctgcatgtggcgcggcagtaagcctttcaccagtttcacatcccagcgttccagcgcttctggcatcagggtatggttggtgtaagcgaaagttttgctggtaatggcccaggcgtcatcccagctcatctggtgctcatcgatcagcacgcgcagcagttctggaatcgcgatagttgggtgggtatcgttcagctgaataacttcgtaatccgccagttcgtgcagtttacgccccgccagatgatggcgacgcaaaatatccgctacgctacaggcacactggaagtattgctgcatcaggcgcagctttttaccggcagtatggttgtcgtttggatagagaactttggtcagtttttccgcattgatgccctgctgttcggcacgcaagaaatcaccgtcgttaaatttagtcagatcaaacggatgcgcgtgcgtcgcctgccacagacgcagcggctgcgccacgccattacgatagccgacaacggggagatcccacgcttgaccggtaatggtaaactccggctcccagcgtccgtctttcgtcactttaccgccaatccctacctgcacatccagtgcttcgttgtggcggaaccacgggtagttactgcgatgccagtcatccggcgcttcaacctgtttgccatcgacaaaagactggcggaacaaaccatattgatagttcagaccgtaacccgtcgcagactgaccgacagttgccatactgtcgaggaagcacgccgccagacgtcccagaccaccgttacccagcgccgggtcgatctcttcttccagcaggtccgtcagattgatgtcataagccttcaagctatcctgtacatcctgataccagccgagattcaacaggttgttgcccgtcaggcgaccaatcaaaaactccatactgatgtagttaacatgtcgctgattcgccaccggcttggcgaatggctgagcacgcagcatttcggccagtgcttcactcactgctagccaccactggcgaggagtcatttcagccgcagaatttaagccataacgctgccactgacgactaagcgcttcctgaaattgcttatcgttaaaaataggttgactcataggagttccacttttcttagattttcaacacaacgttatcgctagtttgccaggctcgatgttgaccttcctcatcctgcgggggattaggcagggaggagttgcggggatgagcaaggaaatgtgatctcaaccacttaaagctagtgcaaaccacaggattagcatcaaatcaatgcaatacagcgcagaaaatctgtatctaagtgcaaaaaatggccgttgcgtattttcaaaaagcggaaggtaactctataaattaagtaaaggagtgaaacagtttcataagtaaaatatccagtgtgctccatctcattcttaatagatttattaagatcatctttttagatggcactttcatcaggaatgaagaagaaacccttgcttaaatgaatctgatgaacataagggaaaccagtattcacgctggatcagcgtcgttttaggtgagttgttaataaagatttggaattgtgacacagtgcaaattcagacacataaaaaaacgtcatcgcttgcattagaaaggtttctggccgaccttataaccattaattacgaagcgcaaaaaaaataatatttcctcattttccacagtgaagtgattaactatgctgattccgagtaaactaagtcgtccggttcgactcgaccataccgtggttcgtgagcgcctgctggctaaactttccggcgcgaacaacttccggctggcgctgatcacgagtcctgcgggctacggaaagaccaccctcatttcccagtgggcggcaggcaaaaacgatatcggctggtacagcctggatgaaggtgataaccagcaagagcgtttcgccagctatctcattgccgccgtgcagcaggcaaccaacggtcactgtgcgatatgtgagacgatggcgcaaaaacggcaatatgccagcctgacgagtctcttcgcccagcttttcattgagctggcggaatggcatagcccactttatctggtcatcgatgactatcatctgatcactaatccagtgatccacgagagtatgcgcttctttattcgccatcaaccagaaaatctcaccctggtggtgttgagtcgcaaccttccgcaactgggcattgccaatctgcgtgttcgtgatcaactgctggaaattggcagtcagcaactggcatttacccatcaggaagcgaagcagttttttgattgccgtctgagtagcccgattgaagccgcagaaagcagtcggatttgcgatgacgtttccggttgggcgacggcactacagctaatcgccctctccgcccggcagaatacccacagtgcccataagagcgcacgccgcctggcgggaatcaatgccagccatcttagcgattatctggtcgatgaggttttggataacgtcgatctcgcaacgcgccattttctgttgaaaagcgccattttgcgcagtatgaacgatgccctcatcacccgtgtgaccggcgaagaaaacgggcaaatgcgcctcgaagagattgagcgtcaggggctgtttttacagcggatggatgataccggcgagtggttctgctatcacccgctgtttggtaacttcctgcgccagcgctgccagtgggaactggcggcggagctgccggaaatccaccgtgccgccgcagaaagctggatggcccagggatttcccagcgaagcaattcatcatgcgctggcggcaggcgatgcgctgatgctgcgcgatattctgcttaatcacgcctggagtctgttcaaccatagcgaactgagcctgctggaagagagccttaaggccctgccgtgggacagcttgctggaaaatccgcagttggtgttattgcaggcgtggctgatgcaaagccaacatcgctacggcgaagttaacaccctgctagcccgtgctgaacatgaaatcaaggacatcagagaagacaccatgcacgcagaatttaacgctctgcgcgcccaggtggcgattaacgatggtaatccggatgaagcggaacggctggcaaaactggcactggaagagctgccgccgggctggttctatagccgcattgtggcaaccagcgtgctgggtgaagtgctgcactgcaaaggcgaattgacccgcagtctggcgctaatgcagcaaaccgaacagatggcacgccagcacgatgtctggcactacgctttgtggagtttaatccagcaaagtgaaattctgtttgcccaagggttcctgcaaaccgcgtgggaaacgcaggaaaaagcattccagctgatcaacgagcagcatctggaacagctgccaatgcatgagtttctggtgcgcattcgtgcgcagctgttatgggcctgggcgcggctggatgaagccgaagcgagcgcgcgtagcgggattgaagtcttgagctcttatcagccacagcaacagcttcagtgcctggcaatgttgattcaatgcagcctggcccgtggtgatttagataacgcccgtagccagctgaaccgtctggaaaacctgctggggaatggcaaatatcacagcgactggatctctaacgccaacaaagtccgggtgatttactggcaaatgaccggcgataaagccgccgctgccaactggttgcgtcatacggctaaaccagagtttgcgaacaaccacttcctgcaaggtcaatggcgcaacattgcccgtgcacaaatcttgctgggcgagtttgaaccggcagaaattgttctcgaagaactcaatgaaaatgcccggagtctgcggttgatgagcgatctcaaccgtaacctgttgctgcttaatcaactgtactggcaggccggacgtaaaagtgacgcccagcgcgtgttgctggacgcattaaaactggcgaatcgcaccggatttatcagccattttgtcatcgaaggcgaagcgatggcgcaacaactgcgtcagctgattcagcttaatacgctgccggaactggaacagcatcgcgcgcagcgtattctgcgagaaatcaatcaacatcatcggcataaattcgcccatttcgatgagaatttcgttgaacgtctgctaaatcatcctgaagtacctgaactgatccgcaccagcccgctgacgcaacgtgaatggcaggtactggggctgatctactctggttacagcaatgagcaaattgccggagaactggaagtcgcggcaaccaccatcaaaacgcatatccgcaatctgtatcagaaactcggcgtggcccatcgccaggatgcggtacaacacgcccagcaattgctgaagatgatggggtacggcgtgtaagtttagccggataacgcgccagatccggcttacatctctgcatcattcaatgctcacccgcgttacgccatctgtttctatcaaactaaaccgcaccggcaagaaacgctccaccaccgcgatattggtcagcagatggcaactgggatgggcgaccgtaaattcccccgcgcccgccagcgccatcggtagcaccagttggtcagcaagatattcccccaccgccgccgtgcttgccaggtagcgtttcacctctttcaccaactgtgccgcaaccacctcggcactgacgcgcttttcaccgacgacaaaaaagcgttcggtgatattttcactttcgacttcaaggctgacggtattacccggcccctggtcgcgcggcaggttatgaatattctgttcatgcagggaaaaactccccgccagtgtagcgatttcacgctcagcaacatggcgcggcacaccagctaatagaacttctccacgcatctgcacaatgttcccgcgctcgccaagttgcaaggtgttaaagcttgccacggggctgacttccgttgccaccacaccgcctccggcagggtaaaaaccgtggcgtaacagcgtggtttgctgatgaattcctattttcgccagcagcggctccagcacccggcggataaaatccgcaggcggcgcgctcgggttatcggtgccgccgctcacttcaacacggctaggtccatcggcaaaccacagcgcgggcagcaccgtttgcagcaccagcgtacaacttccggcgctaccgatagcaaagcggtaatcgccgccgcgcacggtgccgggccggaagagcagacgctggctccccagctccgcgccttccacggttgctccgcaaatttccgtcgccgcctttaccgcggtcagatgctggcgcaacagccccggtttcgcccgcccggcacgaatgctggtgatggtaaatggctggccggttatcatgctcaggctcagcgcgctgcgcaggatctgcccgccaccttcgccctgtgcgccatccagcgcaatcatccttttcatcatttatccttttacgcacaccacctgacgcagggtatagataacttccaccagatcgctttgtgccgccatcaccgcatcaatatctttatacgccatcgggatttcgtcgatcacttcggcatctttacggcattccacatgcgcggtggcacgaatttgatcttccacgctgaacagttttttcgctttagttcggctcattacccgcccggcaccgtggctgcagctacagaagctctcttcatttcccagcccacggacgataaagctttttgctcccatgctaccgggaataattccatattgaccagcacgcgcagacaccgcgcctttacgcgtcacgtagatctcttcaccaaagtgctgttctttttgcacatagttgtggtgacagttgatctcttccatcgccagcgtttgtggctgtctgaccgttttctgcgtaatgctctgcaatgccgttaccacgttttccatcatcgcatcgcggttaaggctggcaaaaagctgcgcccaggccacggctttcaggtaatcatcaaagtattccgtaccttccataaagtacgccagatcacggctcggcaacgtctcaagcgtttcctgcatctctttttgtgccagatcgataaagtaagtcccgatggcgttaccaattccgcgactaccggagtgcagcataatccacacctggtcgctctcatcaaggcagatttcaataaagtggttaccggttcccagcgttcccaggtgtttatagttattggtattcaggaaacggggatatttttgcgttaaccactgataaccggcttcaagctcagcccatttagcatcgacgttaacaggtggattttcccaggcacctttatcacgtttacaacggccagtggtacgcccgtgcggcacggccgtttcaatcgcctgacgcagctctgccaggttttcaggcaggtcttccgccgttaacgcggtacgcagcgcgttcattccacagccaatatccacgcccaccgccgccggaataatcgcccctttggtcgggatcacgctaccaatggtggaacctttacccaggtgtacatcaggcattaccgcaatatgtttgaaaataaacggcatcttcgccgtattaataagttgctgacgcgcatcggcctctaccggcacgcctttggtccacatttttaccggggcattttcagtggtcagtaattcgtaattcattttgtttttctcttttcgttgtttgctgtcctgataattgcaaccgtcgtgccagaaaattaaataagcagcttaattttttaattcattgttttaaaaaagattatatctttacgtccgtaaccggagatttcccgcaaagccaatttaccgataatgaaatatcgtcttttataaggatatctaagatgcgtaaaacagtggcttttggctttgtcggtaccgtactggattatgccgggcgcggcagtcagcgctggagtaaatggcgtccgacactctgtttatgccagcaagaaagcttggtcatcgatcgactggaattgttgcacgacgcccgcagccgcagcctatttgaaacgcttaaacgcgatatcgccagtgttagcccagaaacagaagtggtgagcgttgagattgaactgcataacccgtgggatttcgaagaggtctacgcctgcctgcatgatttcgcccgtggttacgagtttcagccagaaaaagaagactatttaattcacatcaccaccggtacccacgtcgcgcagatttgctggtttctgctggcagaagcgcgttacctgcccgcccggctgatacaatctagtcctccgcgcaaaaaagaacagccgcgcggcccaggtgaagtaacgattatcgatctcgatttaagccgttataacgccatcgccagccgctttgccgaggaacgccagcaaacgcttgattttcttaagtccggcattgccacgcgtaacccccacttcaaccgcatgattgagcagatcgaaaaagtggcgatcaaatcccgcgcgccgattctgcttaacggtccaaccggcgcgggcaagagttttctggcgcgacgcatcttagagttaaaacaggcgcggcatcagtttagcggcgcgtttgtggaagtgaactgcgccaccctgcgcggcgataccgccatgagcacgctgtttggtcatgtaaaaggcgcgtttaccggggcgcgggaatctcgtgaaggtttattacgcagcgccaacggcggaatgttgtttcttgatgagattggcgaactgggcgcagacgaacaggcaatgctgctgaaagccattgaagagaaaaccttttacccgtttggcagcgatcgccaggtgagcagtgattttcagcttatcgccggaacggtgcgcgatttgcgccagctggttgccgaaggcaaatttcgcgaagatctgtacgcgcggatcaatctctggaccttcaccctgccgggtctacgccagcgccaggaagatattgaaccgaacctggattatgaagtggagcgccacgccagtctcactggcgacagcgtgcgttttaacaccgaagcgcggcgcgcctggttggcttttgcgacctctccccaggcaacatggcgcggtaactttcgcgaactttctgccagcgtcacgcggatggccacctttgccactagcggacgcatcactctggacgtggttgaagatgagataaaccgtctgcgctataactggcaggagagccgcccctccgcgcttacggcgttgctgggcgcagaggcagaaaacatcgatctcttcgaccgtatgcaactggaacacgttatcgctatctgccgccaggcaaagagcctttccgcagccggacgccagctttttgacgttagccgccagggcaaagccagcgtcaatgacgcggatcggctacgcaaatacctggcgcgttttggtctgacgtgggaagccgtgcaggatcagcacagctccagttgaatatggtggtccgtcagcacctgcatcacgcttactggcggcggggcgtcggtgtagacggcatctaccatgctgatgctgcccatattgaccatcgcgttacggccaaatttcgagtgatcgacaaccagcataacgtggcgcgagttctcaataatggcgcgtttggtgcgaacttcgtggtaatcgaactccagcagcgagccgtcgctatcgatgccgcttatccccagaatgccgaaatcaaggcggaactgggagataaaatcgagcgtcgcttcgccaatgatcccgccatcgcggctgcgtaattcgccaccggcgagaatgatgcgaaaatcttcttttaccatcaacgtgttagcaacgttgagattgttggtgacaatgcgcaaattgctgtgattgagcagtgcgtgcgctaccgcttccggcgtggtgccgatatcgataaacagcgtcgagccattggggatttgctccgccactttgcgggcgatgcgctctttttcttcggtctgggtggccttgcgatcgtgccacggcgtgttaaccgaactggaaggcagcgccgcaccgccatgatggccaggatcaggttttgctccgccagctcattgaggtcgcggcgaatagtctgcgggctgacggagaaatgctctaccagctcttcggtactgacataaccctgctgtttaaccagttcgataataccgttgtgacgttgtgtttgtttcatttataaatccctggaattattttcgttttcgcgcattgaggctatcaacaaaagccatcgctaaacccacggctaacccggcgatgtgtgctccgttcgccatgctcatcccaaacaaatcaaaccatccggcgacaatccagatcagcgcaaagataattaacccacgttgcaggtaaatgccactttgcggatcgcgttcgccacgtagccagacgtagcccatcagcgcatacaccacgccagaaagcccgccaaaccacggcccgctgaatttttgctgcacatagccgcttaacagggcgctgataagcgtaatgacaattagcttaccgctaccgaggcgtttttccaccgcaccgccgagataccaccaccagagcaggttaaagaggatatgcatcaggctgaagtgcattaacgcgtgggtgaagtaacgccagaactcaaatttcagtgttggatcgaatggccaggccagccataacatcacttcctgatcgccgagaatttgcatggcaataaacaccaccacgcaggcgatcatcatcacccaggttaccggacctgcgcgttcacgcaaggcggcaaagaaaggataacggcgataatgcaggccactgccggtatggcctgcctgccagctcgccgccagataacgcggatctgccgggttttcgagaaaacgcgccagctccgcccgtacgcgctcggcctgggactcatccgccagccagacatcgctttggttatgttgttgaatcgtgaggataacaccctgcgtcgccatgtaatcaacaaacgcctgcgccacgcgggggttagcaaaagaggtaatcatcaacatcgttgctgtcgcttattccacacaaaaggggacagtataaagcgttacgcgccgtacgccacctctgcgggaaactgacgttgccaggcttcaaagccgccgtcaatgctatagaccacatcgtagccctgttgcagcagatactgcgccgcgcctttgctgctattgccgtgataacacatcaccatcaccggagtgtcaaagtcgttatcacgcataaaagcgcccagcgtgtcgttggttaaatggaaagcctgcaccgcatgtcccattgcgaaactctgtggatcgcgaatatcgaccagcaccgcctctttttcctgcaacttctggtgcgcgtcggcaacgttaatacattcgaactgatccatgcgtctctctttctttacaaacaagtgggcaaatttaccgcacagtttacgtcgaagcggcagataaacgccataatgttatacatatcactctaaaatgttttttcaatgttacctaaagcgcgattctttgctaatatgttcgataacgaacatttatgagctttaacgaaagtgaatgagggcagcatggaaaccaaagatctgattgtgatagggggcggcatcaatggtgctggtatcgcggcagacgccgctggacgcggtttatccgtgctgatgctggaggcgcaggatctcgcttgcgcgacctcttccgccagtagtaaactcattcacggtggcctgcgctaccttgagcactatgaattccgcctggtcagcgaggcgctggctgaacgtgaagtgctgctgaaaatggccccgcatatcgccttcccgatgcgttttcgcctgccacatcgtccgcatctgcgcccggcgtggatgattcgcattggtctgtttatgtacgatcatctgggtaaacgcaccagcttgccgggaagtactggtttgcgttttggcgcaaatagtgtgttaaaaccggaaattaagcgcggattcgaatattctgactgttgggtagacgacgcccgtctggtactcgccaacgcccagatggtggtgcgtaaaggcggcgaagtgcttactcggactcgcgccacctctgctcgccgcgaaaacggcctgtggattgtggaagcggaagatatcgataccggcaaaaaatatagctggcaagcgcgcggcttggttaacgccaccggcccgtgggtgaaacagttcttcgacgacgggatgcatctgcctagcccttatggcattcgcctgatcaaaggcagccatattgtggtgccgcgcgtgcatacccagaagcaagcctacattctgcaaaacgaagataaacgtattgtgttcgtgatcccgtggatggacgagttttccatcatcggcactaccgatgtcgagtacaaaggcgatccgaaagcggtgaagattgaagagagtgaaatcaattacctgctgaatgtgtataacacgcactttaaaaagcagttaagccgtgacgatatcgtctggacctactccggtgtgcgtccgctgtgtgatgatgagtccgacagcccgcaggctattacccgtgattacacccttgatattcatgatgaaaatggcaaagcaccgctgctgagcgtattcggcggtaagctgaccacctaccgaaaactggcggaacatgcgctggaaaaactaacgccgtattatcagggtattggcccggcatggacgaaagagagtgtgctaccgggtggcgccattgaaggcgaccgcgacgattatgccgctcgcctgcgccgccgctatccgttcctgactgaaagcctggcgcgtcattacgctcgcacttacggcagcaacagcgagctgctgctcggcaatgcgggaacggtaagcgatctcggggaagatttcggtcatgagttctacgaagcggagctgaaatacctggtggatcacgaatgggtccgccgcgccgacgacgccctgtggcgtcgcacaaaacaaggcatgtggctaaatgcggatcaacaatctcgtgtgagtcagtggctggtggagtatacgcagcagaggttaagcctggcgagctaaattaacgtaaggtgatcaggtcagatttcaatctggcctgagactgatgacaaacacaaaactgcctgatgcgctacgcttatcaggcctacgtggtttatgcaatatattgaatttgcatggtcttgtaggccagataagacgttcacgtcgcatccggcatgaacaaagcgcactttgtcaaaaatctaacctactttttaattcagggaattaccgcaaagcccacgccatcatacccaacgtaacaaaactcaggcacgttccccactcgcccgctgaaaaatagcattaatgcgcccagcgccagcataaaaattttgagcagaaggtaaattgttggcgtgataaggatattacaaacttcaataataccggcaagtccgacacccagcatggcaataaccaccgccaaaaattgcgccagtatggggatgccgaaaaaagtcattaccaggctggtcaaaatccattttctgttttgcattattctttccattctttttgaatggtgaaattatactccccgagtccccttgccccttctggacacttttccgaaatgatggcggaaaaaaacgggaccctttggccccgttctatttattggtgaacttacaatctcaccggatcgatatgccagatatgatcggcgtactctttgatagtacggtcagaagagaagtagcccatattggcaatgttcagcatcgcttttgcggtccactcttcctgaagctcgtagagttcatcgactttatcctgacaatcgacatagctgcgataatccgccagtacctggtagtgatcgccgaagttgatcaggctatcaaccagatcgcgatagcgacccggatcttccggactgaatacaccgctgccgatttgcgtcagcacctgatgcagctcctcatctttctcgtagtattcacgcggtttgtagccctgacgacgcagttcttccacttcttccgctgtgttaccaaaaataaagatattgtcagcaccgacatgatccagcatctcgacattcgcaccgtccaacgtaccgatagtcagcgcaccgttaagcgcaaacttcatgttactggtgccggaagcttccgtccctgccaggctaatctgttcagacagatctgccgccggaatgatcaactgcgccaggctaacgctgtagttcgggatgaacacgactttcagcttatcgccaatctgcggatcgttgttgatcactttcgctacgtcattgatcaaatgaataatgtgcttcgccatgtaataggcgctagccgccttaccgccaaaaatattcacgcgcggtacccacttcgcatccgggtcggccttgatgcggttatagcgggtaatcacatgcaacacattcatcaattgacgtttgtattcgtgaatacgtttgatttgtacatcgaacaacgcctttggattcaccaccacattcagctgctgggcgatatactctgccagacgctttttgttctccagcttcgcctgatgcacagcgtgattaaccattgggaaatcacagtgttgttgcagctcattaagcaggctaaggtcggtgcgccagttacggcccaggtgttcgtccagcacggcactaaggcttgggttcgctaccgccagccagcgacgcggcgtcacaccgttggtgacgttggtgaaacgacccgggaagattttcgcaaagtcggcaaacaagctttgcaccatcagattagagtgcagttcgcttacaccgttaactttgtggctcacaacaaccgccagccaggccatacgcacacgacgaccgttggattcatcaatgatgctcgcccgtcccagcagatcggtatcgttcggatactgttcctgcaaggttttcaggaaatagtcgttgatttcaaagatgatctgcaggtgacgcggcagaattttacccagcatatcaaccggccaggtttccagcgcctcgctcatcagcgtgtggttagtgtaggagaagacctgacaacacacctcaaacgcgtcgtcccagctaaattggtgctcatcgatcagcagacgcatcatctcaggaatgctcagtaccggatgggtatcattgagatgaatcgcgattttatccgccaggttatcgtaggttttatgcaactgataatggcggcttaaaatgtcctgaatggtgctggaaaccaggaagtattcctgacgcaggcgcagctcacgcccggagtaggtggagtcatccggatacagtacgcgagatacgttctcggagtggtttttatcttccactgccgcgaagtagtcaccctggttgaatttaccgaggttaatttcgctactggcttgcgcactccacaaacgcagcgtgttggtcgcgtcggtgtcgtaaccagggattatctgatcgtaagcgactcccagaatctcttcggtttcaatccagcgcgtttttttaccttcctgctgaatgcgaccgccaaaacggactttatagcgcgtgttgtggcgtttgaattcccacgggttaccgtattccagccagtagtctgggctctctttctggctaccgttaacgatgttctgcttgaacataccgtagtcatagcggatgccgtaaccgcgccccggcaaccctaacgtcgccagagaatcaaggaagcaagccgccagacgtcccaggccaccgttaccgaggcctgggtcattttcttcatcaatcagctcttcgagatttaaccccatcgcttccagtgcgccctgtacatcttcgtaaattcctaggctcaacatggcgttggagagcgtacggccaatcaaaaactccatgctcaggtagtaaacctgacgagtttcttggctcaactgggcacggttactacgtaaccagcgctccacgagacgatcgcgcacagcaaataacgttgcgttcagccattcatgtttattggcgacgaccgggtcctttccaatcgtaaacatcagcttgtaagcgatagagtgcttaagagcttctacgctaagcgtggggctactatatgtaaacggagcattcatataggcgtttcctgaaaattatttcaagcgatagtaaagctcacggtagctcttcgccgcgacctgccagctaaaatccattgccatagcctgacgttgcacaaaccgccacagactaggacgggaccacagtacaaaagcacgtcgaatagcccgtaacaggctccaggcattactatcttcaaagacaaacccactggcgacgccatctgcaaggttctcaagagaacagtcagaaaccgtatcagcaagcccaccggtgcgccgcactaacggcagcgtaccgtacttcaatccataaagttgcgttaagccgcacggttcaaaacggctgggcaccagaatgacgtccgcgccgcccataatgcgatggctaaatgcttcgtgatagccaatctgaacgcccacctgaccggggtattccgctgccgccgcaaggaaaccttcctgcagcaccggatcgcccgcgccgagtagcgccagctgcccgccctgctccagaagacccggtaaggcttccagcaccaggtcgagacctttctggctggtcagacggctcaccactgcaaaaagcggcactttatcgtcaaccttaagccccattgcgatttgtaactggcgcttattttccgctttatcttccaacgtatcgcgggtgtaacggctggccaacagtaagtccgtctctggactccagattttctcgtccacgccgttcagtacgccggaaagacgcccttcacggtgacgctgttgcaacagaccttccataccgtaggcaaactgcggttcggtgatctcgcgagcgtaggttggactgaccgccgtaatgtgatcggcatagtacagaccggccttcaggaaagagatttgtccgttgaattccagcccatgaatattaaagaaactccatggcaattggatgtcattcatgtgatgtgcataaaacatgccttgataggccaggttgtgcacagtaaacacgctcttcgccggacgcccgcgcgccgccagatacgcaggcgcaaggcctgcatgccagtcgtgcgcatgcaccacatcaggacgccagaatgggtcaagcccgctggccatttctgccccaacccaccccagcagcgcaaaacgcaatacgttgtcggtataggcaaataagttggtatcgtgatacgggcttcccggacgatcatagagatgcggcgcgtcaatcaggtaaatgccaaccccgttgtaatgaccgaacaacagcgtgatatgtccggcgaaggtatcacgacgggatactacctgcgcatcggtcacgccacggcgaatatcgggaaatgcaggcaacagtacgcgagcgtcaacgccgtctgcgatttgtgctgcgggtaatgccccaataacatcagccagaccgccggttttaagcagcgggaacatctcactacatacatgtaaaacctgcattatcgctcctgtttatgccctaacttccgtagcatttcgcgcgttaccagcacgatgccttcttcactacgatagaaacgacgtgcatcttcctctgcgttttcaccaatcaccatgccttccggaataacacaagcacgatcgatgacgcagcggcgcagacggcagctgcgacctacccatacttccggtaacaatacggcggaatcaatgttgcagaaactattcacgcgaacgcggctgaacagaacggactgcaccaccacgctaccggagatcacacaaccgccggaaaccagactgttaagggtcatcccgtggctaccggagcgatcctgcacgaatttcgctggcggtaaactttcattgtaggtgcgaattggccaattgcgatcgtacatatccagttccggcaccacagaggccagatcgaggttcgctttccagtaagcttccagcgtacccacatcgcgccagtacggctcggcatccgggtcggattgtacgcaagagagcgggaacgggtgcgcataggccagaccggcttcggtgatcttgggaatcaaatctttgccaaagtcgtggctggagttctcatcgcgatcgtcttcttccagcagttcatacagatagtcggcgtcaaagacgtagatacccatactcgccagagatttgctcggatcgttcggcatactcggcgggttagcaggtttttcaacgaattcgataattttatcgttctcatcaaccgccataacgccaaatgcggaggcttcttcaatcggtactggcatacaagcaacggtgcaacgtgcgcctttttcgacgtgatcgataagcatacggctgtagtcttgcttgtagatatggtcgcccgccaggatcaccacgtattccgctttataacggcggataatgtcgaggttttgggtgaccgcatctgcggtgccgcgataccagttttcccctttcattctctgctgtgctggcagcagatcgacaaactcgttcatttcttcattgaagaaactccagccgcgctgaatgtgctgcaccagagtgtgggactggtactgggtgatcacgcccatacgacggatcccggagttgatgcagttagacagcgcaaagtcgataatgcggaacttaccgccgaagtgtacggccggttttgctcgcttattggttaaatccttcaggcgggtaccacgtcctcccgccagtatcagggcaacagatttcaatggcagctggcgcgccaacattaagtgatcgttcttctctaaactaaccatgactaactccttttttatcatctctggaacacacacaatccgtgtgcaggtccctgccagacagccgtaatcactgggttatcctctccagcgaatgggggaatggcgtgccactccccagcaggtaaaacaatctctgttacctcaagcgtggcgttaattgcgatcaaaaagcgatcgctgagcagaatttgcagctgtttcggcccgttttgccactcatccgtgcttaaaggttgagcatatcgatttagccaacggacattgccgtcgccttcttcccaccagcgattctccaccaaagcgggaatgcgcttgcgcagatggattaacgcggcggtaaatgcggttaaaccactgcttgcctggctccagtccaaccaggttaattggttatcctgacagtaggcattgttattgccatgctggctgtgaccatgttcgtcaccggccagtaacatcggcgtaccctgggagagcaacaacgttgttaacagggcgtgaatgctgtcgcgccgccgttcaaccaggtcaagagaaccgcctaacccttctttaccatgattgttactgtaattgttgttggtcccgtcgcgattttcttctccgtttgcttcattgtgtttatggttgaagcaaacgcagtcgcgaagcgtaaaaccgtcatgcgcggtgacgagattaatcgcggcactcggcagacgaccattacgtttaaaaacatcgctggaggcagcaaaacgcccggcaaacgcccccagaggcaaatcataatgtagccagaaacgacgggcagcatcgcggaaatgatcgttccactcggcaaacagcggcgggaaatttcccacctgataaccaccaggagcgatatcccacggttcagcaattaacttcacctggctgagcaccgggcagttctggatagcggtaaacaacggcgcatcctgacggaactctggcgtacggcccatgactgccgccagatcaaagcggaaaccatcgacgtggcaggtttctacccaataacgcaggcaggcgctggcataatccaccaccgccggatgactcaaattgagcgtgttgccgcaaccggtccagttgtgataatcgccgtcttctcttatccaataatagctacggttatcgatcccacgcaggctgaataacgggccgtcgaggtccagttccgcactatggttgagcacgatatcaagaatgacttcgatacccgctttatgcagtgctttgattgcatcgcgaaactcatccagcgccgtttctgggctgcaggcatacgccggatgcagcgcaaacatcgccaccgggttgtaaccccagtagttacttagccccatgcgttgcagacgtggttcactggcaaactgcgccactggcagcagttccagcgcggtaatgcccaattgtttcaaatagttgatcatcaccggatgcccgagggctttataagtgccacggatctcgaccgggatctccgggtgcaagtacgttaatcctttgacatgggcttcataaatgatggtgctgccccacggcgtgcgcggcggggcatcatcttcccagtcatagtgatcaaccaccactacgcatttcggcgcaatggcggcgttgtcgcgatagtcaggttcattatgaccggcgtgcagcagcgggttatctttaaactccccgtcaatttgccgcgcgcaaggatcaatcaacaacttcgccgggttaaagcgatgcccctcggcgggttgccaggggccatgaacgcgataaccataacgcaaacccgggcgcgcatccggcagataaccgtgccaaatgtcgccactgtgccctggcaagtcatagcgatgttcctggccattggcgtcaaagacacacagttctacccgctcggcatgagcggagaaaagtgtgaagttgacgccctgaccgtcgtaatgcgcgccgaggggagcgggtttgccaatggcgagttgtgtcattctgcctcccgaaccagccagatagtggccagcggtggtagcgtcaggcttagactatgctgacgaccgtggctggcaatctcatcgctgtgtaccgtgccgccattgcctgcattactgccgtgatagtgcatggaatcggtattgaggatttcacgccatttgcccggctggtttatgccgaagcgataatcatgacgcggtaccggcgtaaagttactggcaacgatgatttcgttaccctctttatcgcgacgcacaaagatcagcacgctgcgttctttgtcatccaccaccagccattcaaagccgtacgggtcaaaatccagttcatgcattgctttatggtggcggtaggtgaggttcagatcgcgcaccagacgctggacaccgtggtgccagttatcgccgccttccaacagatgccagtcgaggctggcgtcatggttccactcgcggccctgggcaaattcgttacccatgaacagtagtttcttgcccgggaatgcccacatccagccatagtaggcgcgcaggttcgcgaatttctgccatgcgtcgcccggcatgcggtcgagaatgctttttttaccgtggaccacttcatcatggctcaacggcaggacgaagttttcagtgtagttgtagagaatcccgaaggtcagtttatcgtgatgatactgacgataaaccgggtcgagcttcatgtagtccagggtgtcatgcatccagccgaggttccacttgtaccagaagcccagaccgcccatatcctgcggacgagaaacgccagggaaatcggtagactcctcagccattgtcaccgcaccggaaacctgctcaccaagaatacggttggtattacgcaagaattcaatcgcttcaagattctcgcgcccgccaaattcgttcgggatccactccccctctttacggctgtagtcgcgataaatcatactcgccaccgcatcgacgcgcagcgcatcaataccaaaacgttcaatccagtaaagcgcgttaccgacgaggaagttactgacttcacggcgaccatagttgtagatcagcgtgttccagtcctgatgatagccttcacgcggatcgctgtgttcatacaagttcgtgccatcaaattcggcaagcgcaaagtcatcagtcgggaagtggcctggcacccagtcgagaatcacgttcagaccagctgcgtgtgcggcatcaatgaaataacggaagtcgtcgcgagtaccaaaacggcgggttggcgcatacaggccggttggctgataaccccaactgccatcgaagggatgctcgttaatgggcagtagttcgaggtgggtaaagcccatccatttagcataaggcaccagttgatcggccagctcgcggtagctcaaccagaaattgttgtcggtgtggcgacgccaggaacccaggtgaacttcataaatagagattggcgcatcaaactgattcgcttttttgcgctcttcagtctgtacaaccttttccggcagcccgcaaataagagacgcggtttccgggcgcatttgcgcttcaaaggcataagggtcggacttcagacgcaagttgccattggcatcaatcatctcgtatttatagagctgaccgttatgcgccccagggataaacagttcccagatgccgctctctttacgcaggcgcatcgggtgacggcgaccgtcccagtagttgaattgcccaaccacgctgacccgacgggcgtttggagcccagacagagaaacgcgtacctgtgacgccatccatagtatctgcatgcgcgcctaaggtttcatacgggcgcaggtgagtaccttcagataatagccaggcatccatttcctggattagcggaccaaaacggtaaggatcatcaatcaggttttgctgaccatgccagacaacagccaactgatagcggaaaaaattcttacgtcgcggaatgacgccgctaaagaatccccgactgtcgagacactccagttttgcgagtttgcgcccggttttcggttcaatcacccacacatcggtagcgtcgggtaaaagggcacggacttccagtcccgcggtggttttatgcattcccagtacggaaaaaggatccgcaaaatggcctgcaattagcgcgttaatcacgtctctatcgatacgatcggacatgcttgtcttcctgttttattgtgtcaccccatccaattggatttttgacttctggttgtgacatttttttgacctgaacggcgcagcactctgtgcatcctctctgcgtcgtcctcacttcaggtaaggctgtgaatactcatgtattcagccacccttaaagaatagccaatgctctatttaactcccggtaaatcatgaaacatctgcgcttactcctgtattacgcactaacaggggcggcatcgcgccccagatttaatgaataaagattacgccagttgacgaagcatccgacgcagcggctccgcggccccccacagcagctggtcgcccacggtaaaggcactcaggaactctggtcccatattcagcttacgcaggcggcctaccggcgtggtcagcgtgccggtaacggcagctggggttagctcacgcatagtgatttcccgatcgttcggaacgactttcgcccacggattgtgcgcagccagcagttcttccacggtcggaatagacacatcttttttcaatttaatagtgaatgcctggctgtggcagcgcaatgccccgacacgcacacataaaccatctaccggaattacggaagatgtgttgaggatcttgttggtttccgcctgccctttccactcttcgcggctctgaccgttatcgagctgtttgtcgatccacggaatcaggctacccgccagcggcacgccaaagttatccaccggcagctcaccgctacgggttaaggttgtgactttgcgttcgatatcgagaatagcagaggacggggtcgcgagttcatctgccacatggccatacagatggcccatctgggttaataactcacgcatatgtcgcgcaccaccgccggaagcggcctggtaggttgcaacggacacccaatcaacaagatcattggcgaataaaccacccaagctcatcaacatcaggcttacggtacagttaccgccaacaaaagtcctgatgccattatttaatccgtcggtaatgacgtcctgattgacggggtcaagaatgatgatggcgtcatctttcatgcgcagagagcttgctgcgtcaatccagtaaccttgccatccgctttcacgaagctttggatagatttcgttggtataatcgccgccctgacaggtcacaatgatatcgagggcctttagcgcctccagatcaaaggcatcctgaagtgtgccagtggttccgccaaaagacggcgcagcctggccaagctgagaagtagaaaagaagacagggcgaatggcgtcgaagtcgcgctcttcaaccatgcgttgcatgagaacggagccgaccataccgcgccagccgataaaaccaacatttttcataagcgtttttttcctgcaaagatgtgtgctgtataaatgtgccggtctcctcttggcacatctttcaccatacaaaaagcagccaaagtcgcaagtgaaattaatcaatgatagcgaagccatcagtaatgcgacttatcctgctttgttagcacgcagaaagtccgcggcaattatcagggaatttgagttatgaatgaaatcatttctgcagcagttttattgatcctgattatggatccgctcggaaacctacctattttcatgtccgtactgaaacatactgaaccgaaaagacggcgggcaatcatggtgcgagagttgcttattgctctcctggtgatgctggtgttcctgtttgcgggtgagaaaattctggcatttcttagcctacgagcagaaaccgtctccatttctggcggcatcattctgtttctgatcgccattaaaatgattttccccagcgctagtggaaatagcagcgggcttccggcaggtgaagagccatttatcgtgccgttggcaattccgttagtcgccgggccgactattctcgccacgctgatgttgttgtctcatcagtacccgaatcagatggggcatctggtgattgctctgctgctggcctggggcggcacctttgtcatcctgctacagtctagcctatttttacgtctgctgggcgagaaaggggtgaacgcacttgaacgcctgatgggattgattctggtgatgatggcaacccagatgttcctcgacggcattcgaatgtggatgaaggggtaacgaggagagtttttcgaaaagaacccggtagcgtcacaactaccgggcgaacaaacttaactcaacagctggaacgcaatcatcccaacgatggcaccgacagtgccgaggatggtttccatcatggtccaggttttcagcgtttcggcttcggtcgcgccggtaaatttaccgaacaaccagaaaccggcgtcgttaacgtggctgacaacaatgctaccaccagcgatacaaatgctcagcgccgccatttgcgcaccggagtagttcagttgttcaataaccggcatcaccagtcctaccgccgttaaacaggctacggtggcagaaccctgaatgatgcgcactgcagctgccagcacgaagcaggtgatagcaatcggcaggcccatgccggttaacgcttcgcccagtgccggacctacgccagagtcaaccagcacctgtttgaacacgccgcccgcaccaatcaccagcagaatgatccccgccggttgcagcgcgtgaccgcaaatctccatcactttgtcttttggcatgccctgacgcattgccagaccgtaaatcgccaccagacaagcaaccagaatcgcggtaaacggatgaccgataaactcaaaccattcgtaagcagtacttccttccggcacaaaacgcgcggcaatggttttcagccctaccagcaccagcggcagcaggatcaggctcaggctgaatccgaaagatggcattttgccttcgccgagatgcggttcgctgatgtcgtcaggaatatgcagctcaacgtaacggctgatgaagttaccccacagcggcccggcaataatcattcccggaattgccgcacacaggccaatcaggatcatccagccaaagtcggcattcatctggcttgccagcagcatcggcgctggtccaggcaccagaaatgccgccgctgccgccacgcctgcaaataatgggattaccagcttcaccaggttcgtaccggtgtggcgcgccatactgaaagcaacgctaatcagcagaactatcgccacttcaaagaacagcggtagcgcacagaccagccccgcaaggccgatggcataatgcgcgcggctgtgaccgaaggatttgagcattttgacggcaatctgatcgactgcgccggtttcatgtaagatcttgccaaacatagctcccagggcgacaaccaccgccaggaagccgagggtgcctcccatccctttttccatcgtcgctgcgattttatcgagcggcataccagaaaaaaggccagcccccatggacaccaccattaaagccaggaaagcgtgcatacgcgccttcatgactaaaaacagcagcagtaaaacagaccctactgctgttaaaacaagcgttaatgtagtcactacttatttgccttttttaataacctcaatggtgcttgccacaacaccttccagcggttgatcgatatccaccaccagtacatcggtttcgtccgcacccggctcctgcagcgtttcaaactgcgtcaccaacatttgggttttaaagaaatggcctttgcgcgctttcaggcggatttcaatcacatcaaaatcgcctttcaaatagatgaaagagagattcggattaccttcacgcagcaagtcgcgatagtgttttttcaatgcagaacagacgatcaggctcactttattagtgcgctgcatagcaaacgcggcgtcgttcagcgcctgcaaccacggtttgcgatcgtcgtcattcagtggttcgccagacgccattttttcgatattgcgccgtggatggaggaaatcgccatcaagaaacgcggcatgaagttgatgcgccacttcactggcgaccgcagatttgccgctgccgcttacgcccatcaagacgtaaatgtggtgatcatggttagtcgtgctcaaagtggtgcccccacaatacaagaattaaaaatgttacgggtaactgttatcggtaacattgtccagccggacaatatcagaagcaatatccatccatgccttaagtgtataagtgtgagctacttcaaatttgtgggcttaaatagatccgcccggactcaaggtgaaacctaaatctaacattttcggtgtcacagattcgccacgaatacgcgccagcaggcgttcagcgccaatactgcccatccgctcacgcggcgtcagcacgctcgcaagtcgtggctccatcacctgaccaatgtcatgaccgtggaaaccggcaatcgccatatcgtcaggaacttttaaccccagacgctgacattcaaacgccgcgccgaccgccaggtcatcattcgtacagaacacgccatccagctgcggatattcccgccgcgcctggcgaatcagttcaataccggaagagtaagaagaagattgctcaaccatcacgctatatggcaccaggcctgcatccagcatcgcctgttcgtatcccttctgtttgatgatagtacgttcgtcgagacgtgcgccgagataggcaatgtggcgatgcccgcgagcaataatggcagtggtcatctggcgtgctgcttcaaagttatcaaaaccgacggcgatatcaaggcatgggctcttgctgtccatcagttccaccacgggaatacccgccacttcaatcatctttaaggtgcgcggcgtgtgggtacgttcggtgaggatcaggccgtcgatattccaggagagcatggattcgaggcgttcttgctccatttccggtttataaccgtagtgcgccagcatggtctgataaccgtgcgcgtcggtgacgctttcgattccgcgtaatacttccgcgaaaacctggttggtgagagaaggtaacaggacgccaatcgcccggctggtggcgttagagaggatatcgggcgcacgattgggaatatagcccagttcatcaagagccgcggcaatcttgccgcgtagagcgacggaaacctgctccgggttgcgtaaaaaacggctgaccgtcattttggtcacgcctacacggtcagccacatcctgaagtacgggtcttttctttttcatcgtcctgaaggtacaaaagagatagattctcttagtttaacacggacacatcagaaccttcccggggaaaacagtgcttgtttacaattattagatatacactaaatcaattgcatcgcattgtgctaacgacgcggcaaaaccccggaagcgtacatcagcacgcgaccggagcgagcgaggaagcctgcaaaaaggcaggcttcaaagatgccgttgagttttaaaccggcggcagatcgaacagtaacacttcgctgtcgctatccgcatggatggagattgcctgctcatcccagattgccagaccatcgctggtgctggctttcacgccgttaatggtgacattgcctttcaccacctggatccagacgcggcgttcagcggcaatctgatgcacgctctgctcatctttcagcaacgcccagcggtacagttccatatcctgatgcactttcaaactaccatctcgcgcatccgggctgagcaccagctgtttgccctgtacggcatcgaagcgacgctgttcataacgcggcgtaataccgttttcttcaggcatgatccagatctgatacagatgcagacgctcggtgctgcttgggttgtactcactgtgacgaatacccgtaccagcactcataatctggaactcacccgccggaacctgctctttattgcccatgctgtcctgatgctcaacagtaccttccagcacgtaggtcaaaatttccatatctttatgcgggtgagtgccgaagccctgccctgcttcaatcacgtcgtcgttaatcacgcgcagcgcggagaagcccataaagttcggatcgtaatagttggcaaaagagaaagtatgccaggagtccagccagccatgatttgcatgaccacgttcatttgctttgcgtaagtagatcatttgtattcgccccctgaatgatttcgatgggcttagtgtggacccgatctgcctgggatgatagagggtgaaaattgacccctctgttcaaaaaaattgaactattcgaggggccatcaaacttacttagcgagagttactgtggagggagaggcttgctcaaatccgcgttcaaggatttccagattggtaagaacttcagattccttgacgtaatttggcgcaccgtgggtgatggtttgatacaacgcatcataaacgcgcccgtaatcgcccatctccggcttcatctcttctctgaccgtcacgccctcgtcattgacatactccagcacaccgacgctatcatccgctgcgaatcccggttcgcccggcataatattagccttcaggctggtttcctgctggtcgataccgtatttaataaagctacctttcttaccgtgaacgataaatttcggataatcgattttcaccagatggctggttttgacgatggctttcaggtcgccataaaacagttgcgcttcaaaggtgtcgtcaggattggctttattacgcaggctgcggatgtcataagcgacgtgatccgggcgaccgaacagagaaataatctggtccatcgtatgcacaccaaggccataaaacgcgccatcctgcggcagcccaggtttggtttctgccaccgggcggtaatagtcaaaatggctttccacttcaacaatctctcccaacttgccactttcaatcgcttttttcgctgtcaggaagcaggagtcaaagcgacgattctgatacggcgtgacggtcagccctttgcttttcgccaacgcaaacagctctttcgcctgcgcaagtgtcggagtgaacggtttttcgaccagcacatttttcccggcttccagcgcgcgtttcgcgtactcgaaatggctgtccgcgtgggtgcagacaacaaccagcttaacatcgggatcgtttagtacttcgtcgagatcgctggtgaaatggatatgggaataaatgggagcctgttcttccggcttcgcatggcgacgaaaaatatgcgcgacatgccagctatccttgcggttaagtacatacggcagatggtaacgggtggtgcttttgccgaagccaataaaggcgcagttgatgaccatgatttcgtcctttttaaggtggttatttacaccttagcgcaaagcggacgtggttcctactggagtgcgcataacgaacacaagcactcccgtggataaattgagaacgaaagatcaaaaaaaaagccagcacccggctggctaagtaatactggaagcaatgtgagcaatgtcgtgctttcaggttctccgcgagggtcttcctgatcgcgagacaataataatcattctcattcgcacttgtccaacactttttgcaaaaaaatgcatttgactcgcatttgaaagtcaatgatgttgaaagggacatttaccccaaagaggacaaaggaacaaatgctcttcccacgaagagggccgctaaccttagtaccccgccgttaaatcatccacgctgcgcgggtcggatgcgccgtacaactcaccgtccggcccaaccataatgctttgtgtactgcccatcgcctctttcagcgccactttctgaccttttgcttccagcagcttgagcgtatccgggctaaaccctttttcgacacgcagctcgtccggcaaccactgatggtggaaacgcggcgcattggtcgcttcggcgacgttcaagccataatcgatgctattcaccaccatttgcagcactgtagtgatgatccggctaccgcctgggctaccggtaaccagccaggttttaccgtctttcaccacaatggtcgggctcatgctgctcagcgggcgtttgttcggcccgacggcgttggcatcaccgcccaccagcccgtaaacgttcggtacgcccggtttggcggagaaatcatccatctggttattaagcagaataccgctctcgcccgcgacaatgcccgtaccgaaggtggtgttcagcgtataggtcaccgccaccgcgttaccatctttatccaccacactgtaatgggtagtttgattactctcataaggcgcaagcttgccggggcgaatttcgctggatggcttcgctttattgatatcaatttgatcggcaatagatttggcataggctttattggtcagcgcctgccacggtactttgacaaaatccgggtcgccaagatattcgctgcggtcggcgtaggcgtatttctccgcttctgccatgatttgcatcgcatcggcgctgccaaagccgtatttcttcatatcgaagttttccagaatattgaggatttgtacgatatggatcccgccggaggatggcggtggcatggagtaaacctgatacccgcgataatcgccgcttatcggagtgcgttcgaccgctttataggctgctaaatcttctttagtgatcaagccaccgtttttctgcatctcctgggcgatctgttccgcaatcgtgcctttatagaattcgtccgggccgttttcagcaatcatctccaggctctttgccaggttcgcctgcaccagcgtgtcgccctttttcagcggctcgccctctttccagaagatagctttactgttttcgtgattcggcaacacttcgctaccgtaggttttgagatcgtcagccagcgcgtcgttaacgataaaaccatcgcgtgccagtttaaacgcgggctgcacgactttgttcagcggcatggtgccgtatttatccagcgccaggctgaaacctgctaccgtacccggtgtgccggaagccagatggctagtgagactttttttgctgtccgggttgccctgatcatcgaggaacatatcgcgggtcgctttggcgggtgccatttcgcggaaatcgatagccgtggtattgccatttttgctgcggattaacataaaaccaccaccgcccagattccctgcctgcggatgcgttaccgccagcgcgtagcccaccgccacggcggcatcaacggcattcccgccctccttgagaatatccacccccacctgagtggcagtggcgtccacagacgctaccattccctgtttcgcgcgtaccgggtggaagacatcttcctccacaccatagctgacgggcggcgcaggaggcgcggcggcggcgctaaaacaacttccactgagcagagcagcaatggccacccggcgtaaaaacgtcggttttatcatcgttattctccagagattaaggggcaaccccagctaagcctggtatataactctgaattaatcatcgttttgtcgggaagcgagtaaacttaaaggatatcttcagaggaggatacgcgatgaaacgacttctgattcttacggcactcctgccgtttgtcggctttgcacagcccattaatactctgaacaaccctaaccagccggggtatcagatacccagccagcagcggatgcaaacccagatgcagactcagcaaatccagcaaaaagggatgctgaatcagcaactgaaaacgcaaactcagttgcaacagcagcatttagaaaaccagataaacaataattctcagcgggtgttgcagagtcagccgggggagcgaaatcccgcccggcagcaaatgctgcccaacaccaacggcgggatgttaaacagcaaccgtaatccggatagtagcttgaatcagcagcatatgctgccggagaggagaaacggcgacatgctgaatcagcccagcacgccgcagcctgacattccgttgaaaactattgggccgtaattattgggccgtaaagttcggaccaatcacgtcaatcgcatcggtacagatgcaatccacaccccagcgcagcaactctgctgcgcgctggggtttattgacggtataaaccagaatccgcagtccggcgtctttcaactgcatcactcgcgctttattgagtaacttatgattgagatgaatagagacgcagcccagccgcgcggtcagttcgcgccagtcgtcgcgccactcatccagcaacaaaccgcgcggcagttccggtgccgcctgttgtgcagcttctaaagcatcaatctcaaagctactcagcagcggcggcgtcataccggcccacagctcgcgtgccgccagcgccaccattttgcccgttaatggcccggtgccggtggtgggtttgatttcgatattcgccatcatcccgtgttcgcggcaacgttccgccacctggctaagcaacggtagcggctcacctttaaacattttgctgtaccaactgcccgcatccacgcgcagtaaatcctgccagttcagttcacccgcgacgccccagccgttgctggtacgttcgagattgtcgtcatggagcaggaagatctcgccatctttgcttaacttcgcgtcaaattcgatcatcttatgaccgtattttgccccgacgtcgatactcgccagggtgttttccggggccagcttaccgccgccacgatgagcgacgatgcggggataaggccagttactcatactcgttgtcctgtttcaccatcaaaaagatgcagctgattttccgccagatgcagccacagcgtgctgcctgccgtcgggcgctcctgatgcgccagtcgcaccaccagcttctgctcgccccagcgtccgtgcgccaggttatctgcgccgaggatctccagcgtgtccatcaccatcggtacgccgccttctgcctggctgcttagcgcaatatgttccgggcgaatgccgagagtcattttacgcccggcatactgacggtagccaccgtttagcggcagctcaataccgccgtccagttcgaaatgcgtgccttcgttattcacgcggcctgtcagcaggttcatcgccggactgccgataaaactcgctacaaacaggctggcgggcttttcgtagacttcaactggtgtgccaatctgttcggcaacaccgccgttcatcaccattactcgctgggcgagcgtcatcgcttcaacctgatcgtgagtaacgtagagactagtcgttttcaggcgacggtgcaactgttgcagttcaagacgcatctgcacgcgcagcttggcatcgaggttagagagcggctcatcaaacaggaacaccgccggatcgcgcacaatcgcgcggcccatcgccacacgctggcgctgaccgccggaaagctcgcgcgggcgacgtttgagcagaccgtccagctccagaatgcgcgccgcttctttaacgcgctcggcaatttgctgcttgcccatgccgcgaattttcagcccccacgccatgttttcttcgacactcatatgcggataaagcgcgtagttctggaacaccatcgcaatcccgcgatcttttggctccatttcagtcacgcgctggtcgttgatccagatatcgccttctgtcacccgctccagcccggcaaccatgcgcagcagcgtgcttttcccgcagccagacggcccgaccatcacgataaattcgccatccgccacatcaagggtcagcggtttaatgacctgggttttaccatcccagcttttggttactgcctgtaatttcagtcctgccatcttatttctcactatcgaccaggccgcgcacgaaggcacgctgcatcactaaaacaatcaccaccggagggataagcgttaacaacatcgccaccatcacactgttccattccgtggtgccttcgcctgtagcgatcatccctttgatccctgccacggtggtgccgagatccacatcggtaataatcaacaacggccacaaatactgattccagccgtagataaaggtgatcacaaacagcgccgccagattagttttggagagcggaaaaacgatgtcgcaaaagaagcgcattgggcttgcgccgtcgatccgcgcggcttccaccagctcatccggcagcgtcataaagaactggcggaacaggaaagtagcggtcgcgctggccatcagcggcagcgttaaaccggcgtagctgtcgagcatctgcaggttggcgatgacttccaccgtcgggaagatacgtacttcaaccggcagcatcagggtgataaaaatcatccagaagaagaggttacgtagcggaaaacgaaaccagacaatggcaaatgcgctgagcatgctgacggtaattttgccgagcgtaatgctgaacgccatcacaaagctgttaagcaacatccgccagaacggcgcgctattcgtgcctaccccgttcacccagatgttgtggatgttttccagcagatgtgtgccggggatgagcgtcatcggcgcggcatagacggcctgtttatccagcgtcgccgcgacaaacgccacgtacagcgggaagaggatcaccgcgatcccgaggatcagcatggtatggctgaatatcgtcagccacggacggttctcaatcattggtaacgcaccttgctttcaacatagcggaactgcaccaccgtcagcacgatgacgaggaacatcaacaccacgctctgtgcggcagagctagccagatccagtccggtaaaaccttcgcggtagatcttataaatcagcgtcgtggtggcctgaaccggcccgccggacgtggcggcgtcgatcaccgggaaggtgtcgaagaaggcatacaccaggttcactaccagcaggaagaaactcaccggggcgataagcggcagcgcaatcttaaagaagcggcgaatcggccctgcaccgtcgatggctgcggcttcgatcaagctacggggaatggattgcagcgcggcatagaagaacaggaagttgtagctgatttgcttccatacactggcaaacaccaccagaaacattgcctgaccgctgttttgcgcgtggttccagtcgtagccgaactccgcgagaaaatgggtgatcagcccgcgaccggggttaaacaggaagatccacaatacggcggcaacggcgggagccacggcgtaaggcagcaacattaaggtttgatagaaacggctgccgcgcacgatgtactccaccagcgccgcaaagaacaggcttaccagcaaaccgctgacggtgacaaaggtgctgaattttatcgtcgtccagaaggagtcgagatagtagctgtcatggaacagcgtgacgaagttatccaggccgacaaactggctggagaaaccaaacggatcgacgctttgtaggctgtaccacaacgcttcgcccgcaggccagataaaaaagataacggtgatgatgagctgcggcgcgaccagcagataaggcagccagcggctgcggaacaccggacgggaactactcattacggttgattcctgaactgtgccggatgcgcttcgcttatccggcctacacgcgatgccaggtcagataagcgaaacgcatccgacattacactgattaagacttcgtgcttttctcaaagcggcgcagcaactgatttccacgctcaacggcggtatccagtgcctgctgtggtgtcttcttaccggtccacacgctctccagctcttcatccacaatcacgcggatctgcggcatgttgcccagacgcagccctttggtgaacggcaacggcggcttattcagcatctgacgcgtcgcggtatccgcccctgggtttttctcataaaagccctgctcacgggtcaggtcatacgctgctttggtgattggcagataaccggttttctgatgccactcggcagcgttttctggcttcgcgaggaaatcgaggaacttcgccacaccggtatacgtttctttatctttaccctgcatcacccacaggctggctccgccgataatggcgttttgtggcgcatctttcgcatcggcgtcgtaaggcatcatgcctacgccgtagttaaatttggcgtactcgcgaatgttggcaagagaaccggaagaggcggtggtcatcgcgcaatcaccgttatagaacttctcggtggattcatccttacgaccgacgtagctgaagtcgcccttcttgttcatctcctcgagcatggcgatgtgtttcacctgctccggcttattgaactccagcaccgcgtccgtgccgtcaaagccgttgtttttgctggcaaacggcagaccgttccaggcgctaaagttttccagttggatccagccctgccagccgctggcgtagccgcacttcatgccggaggctttcagtttcgcggcatagtccgccagatcctgccaggttttcggcggctgttccgggtctaatcctgctttcttgaaggcgtctttgttgtaatagagaacgggggtgctgctgttgaatggctgggagagtaagtggcccgttttgctgtcggagtagtaaccactaaccgtcggcacaaactggctctcatcgaactgaatccctgcctctttaaacacgtcatacaccggtttaatggctttgctcgccatcatggtggcggtgccaacttcataaacctgcaaaatagccggcgcgttgccggtacgaaatgcggcaatccccgcgcttaaattctgttcgtagttgcctttataggtcggtacaattttgtaatccgggttttcggcgttaaaacgttgggccagagaatccacctctttacccagttccccttccatagaatgccagaacggaatggtcgtcactgcctgtgcattccccattaacgccagtccgagcgccagtgcactagctgtataatgtaacggtttcatcgtttatctctcttgttgtaccgaatgcgcgaattcacgcgttttatgctcgcggggtaacatgacatgctcgaattacagaaaaataacttttttgttacatttgtaagatagtaaggtgtcagaaagatgacaaggcggtgacggcgtgggtgagggaaaatgggagatggggcacggataagcgggaaaatatagaaggtctgaatcaaactctacagattgctcatcgtttcatgccggatgcggcgtaaacgccttatcaggcctacaagatcgtgcaaattcaacatattgccactcacccagtaggcctgataagcgcagcgcatcaggcaattttacatttgtcacctgtctcaaaggagtcttttgactccctatcaatcaacgtgttattacccgcctaaatacgcacttctcaccgcttcattcgccagcagcgcatcaccagtatcggaaagcactacatggccgttttccagcacgtagccgcgatccgccagctttagcgcctggttggcgttctgctcgacgagaaagatagtcatcccctgctcgcgcagctgctcgatggtgtcgaaaatttgctggatgataatcggcgcaagaccgaggcttggctcatcaagcagtagcaaacgcgggttgctcatcagcgcacgaccaatcgccagcatctgctgttcaccgccggacatggtgcccgcccgctgaatacggcgctcatgcagacgtggaaacagctcatacacccactttatgcgctcctggaactggtcgcgttcagcaaaaaaaccgcccatcgccaggttctcttccaccgtcatccggctgaagacgcgacgcccttccgggacaatcgccaccgcttcgcgcatgattttcgctgtctgccagtcggtaatgtctttatcatcaaacacaattcgcccgctggtggcacgcggatcgccgcataacgtgccgagcaaggtggttttccccgccccgttcgcgccaatcagcgtgacaatctcgccctgattgatatgcaggctcacctcatgcagcgcctggattttgccgtagtgggcgctgactttgtcaaaggacaacatgactttttccatcttatgcctcacctaaataggcacggatcacgtccgggttattacggatctgctccggcgtaccgtttgccagcggcgtcccctgattgaccacgtaaattcggtcgctaattcccatcaccagcttcatatcgtgttcaatcaacaagatagtggtgttgtgatgattgcgcagttcggcaatcagctcatccagctctttcgtctctttcgggttaagacctgccgcaggttcgtcgagcattaaaatctccggctgcgtcaccatgcagcgggcaatctcaagacggcgctggtcaccataggccaggttactcgcctgacggttggcgtgttccagcaaaccaatgcgctcaagccaggtcgcggcgcggtcgagcgcttcgctctgggcgcgacggaaggatggcgttttcaacaggccagagaacagcccggttttcagttgctgatgctgcgccaccagcaggttttcaattaccgtcatttcacggaacagacgcacatgctggaaggtgcgcaccacgcccatgcgggcaatttgctgccccggtaaaccttccaggtgctgatcgcgcagtaaaatggtgccgccggtgggtttgtagaatccggtcagacagttaaaaaccgtggtttttccggcaccgttagggccgattaagctgacgatctcctgcgggtacagttcaagattgacgttgttcaccgccagcaggccgccgaagcgcatcatcaggccgttaacagataataatggctgactcatgcctgctctcctttcgctgcgccgtttttcagcttcagttgcgggcgcgtcatgggcagcaagccctgcggacgccagatcatcatcagcaccatcaaaccaccgagcattaacatgctgtattcgttgaaatcacgcatcaactcgcggctcaccaccagcaaaattgccgccagaatcaccgcaaattggctgcccataccgccgagcaccactatcgccagcacaaacgcgctttcggcaaaggtgaaggattccgggctgacaaagccctgacgcgccgcaaacagcgttccggcaaaaccggcaaacgcggcacttatggtaaaggcagtcagcttgatacgacgcgggcttaagcccaggctacggcaggcgatttcatcttcacgcaacgcttcccacgcacgccccagcggcatccgcagcaggcggttaatgacaaacaggcttagcaccaccagcagcaacgccaccaggtagaggaagatgacacgatcggagggatcgtatttcaggccaaagaaattactgaacgtgtcccagccgccttcacgagcggtacggctgaactcgagtccgaagagtgtcggtttcgggatctgactgattccgttcgggccgccggtaatttcggtgttattgagcagcaatatgcgcacaatttcgccgaaaccgagggtaacgatcgccagatagtcaccgcgcaaacgcagcaccggaaaaccgagcaggaagcccgccgccgctgccattaatccagcaatcggcaggcaggtccagaagcccaagccgtaatagtgattgagcagcgcaaaagtgtaagcgccgatggcgtaaaaaccgccgtaccccagcaccagcagaccagaaagaccaacaaccacgttcagcccgagaccgaggataatgtagatcatggtcagggtggcaatatccaccgtcccgcgactaaccataaacggccacgccaccgcaagcaccaacagcgccacgaggaacagtttctgcttcaccgtggagccatcaatggcgggcagaataaacttcggtccggaaacgcttttcaaccctttctggaaagccggtcgcaaaagctggaagaaaaagaccaccgccgtgccgataaacacccactgccaacggacatcgctagccgtgtcgaccaccagtttggtgccatccagctccagttgcacgcccataaagacgcccgccagcacaaagaacatcgcggcagagagcagcgccattgcaatatgcatcggtttcatactttctctacctccgggcgacccagaataccggtcggcatcaccagcagcaccagaatcagcagggcgaaactgaccacatctttatattccgtactcagataggcagaagagagcgcctccgcaatccccagaatcaggccgccaatcatcgctcccggaatgctgccaatcccaccgagcaccgccgcggtaaaggctttcatcccggccataaagccgatgtaggggttaatgacgccgtagaactgaccgagcagcacacccgccaccgccgccatcgccgcgccaatcacaaaggtcagcgcaatcacccggtcggtgttaatgccaagcagactcgccattttcagatcttccgcgcaggcacgacacgcgcgacccatgcgggaatagcgaatgaaaatcgtcagcgccagcatggcgaggaaggtaacaatccagatcaccgcctgcatggtggtaatagaggcagagaagttttcgctatgccccaccacccactgaccgttaaacaggctcggcagcgccacgtcgcggctaccttcggtcaggctgacgtagttttgcaggaagatggacataccgattgcagagatgagtgcaatcaggcgcttagagttacgcaccgggcggtaagccacccgttcgatactccagccgtaggcgctggcaatgacgattgcgccgacgaatcccgcagctaccagcagccagccggtatcaatgcccatcatcatcagcgcggcgatgatcataaaactgacgtagctgccaatcatataaacctcgccgtgggcgaagttgatcatgccgataatgccgtaaaccatggtgtagccgatggctatcagcgcgtaggtactgcccagcgtgacgccgttaaacatctgctgcaagaaatacaaaaactgctcagacataaggtaacctttctaaacccgcccgcattttacgggcggtgggatgatcacttggctgccgtggaactaccgtcggcgtgccactggaagacaccaaaatcaaatcccttaagatcgcctttttcatcccagttcagcggcccaatcacggtgtttgcaccgttagcttttaaatctttcaccagcgccagcggctcatcgctgccggtacgctcaagggcagtcgccagagattgcaccgccgcgtaggtgatccagacataaggcccggacggatctttcttgtctgctttcagcgcatcaacgatgccctggtttgccggatcctggtcatagcgttttggcatagtgaccaacatgccttcggcggcatcaccggcaatgttgctcaagctcgcattacccacaccttccggccccataaactgggttttcaggccaacggaacgggcctggcgcagcatctgccccatttccgggtagtaaccgccgtagtaaacgaagtcgatgttttcttttttcaggcgggcgatcagcgcggagaaatctttctccccggcggtaataccgtcgaagaagacgacgttggcgttagccgctttcagcccgtcctgcacgctacgcgccagcccttcgccatactgttgtttgtcgtgaatgatggcgatgcgctggggcttcaccgtctcaagaatgtattttgccgccgttggcccctgggaagagtccagcccggcagtacgcataatgtgttgataaccgcgttgggtcagctccgggttggtcgctcccgggctgatcatcagaataccttcgtcttcatagatatcactcgcaggctgggtagaagaagaacacagatgaccaataacgtatttaatgccgtcattaacgattttgttggcgaccgcaacggcttgtttcgggtcgcatgcgtcgtcatattccacgccaaccagtttatcgcccttaattccccctttggcattaatgtctttaattgcctgacgcgcgccgttaaattccatatcgccccactgggcaatcgggccggacatcgcgccgacaacggcgactttaatatcgtcagccatagcggtgtgactaattgccagtgcaatcatccctgcgatgatagttttcgcattccgtttcatagtcaaaaatccccattcgtgatgttgtgttgctttgtttttatgtgttaacaaatcagactgttctttttttatactgcactgtttttgcctgtctgattaaggggttagcgcagtattttgtgataatagcgattaaaatccctatttttcagtcgattaagaacagataatattctgaatttattgatagataaacagaaaaaagtgcctttgtcagcataaaataacggcacaaagggcggaataattcactatcattcaggggattatgctggacatttttcattctctaatgttttaattttgtaattattgctgttaaaaaattaatcacctgccaaaagaaataaaaaagagaaagcctccgattaaattatttcgctacactggttccacttttgtgatttacacgggttacccatgaagctgaccatcattcgattagaaaaatttagcgaccaagaccggattgacctgcaaaagatctggccggagtattccccttccagcttacaggttgacgataaccaccgtatctacgccgcgcgttttaacgagcgcctgctcgctgccgtgcgggtaaccttaagcggcaccgagggagcactggattccctgcgcgtgcgggaagtcacccgccgtcgcggtgtggggcaatatctgctggaagaggttttgcgtaacaatcctggcgttagttgctggtggatggcggatgcaggcgtggaagatcgcggtgtgatgacggcgtttatgcaggcgctggggtttacggcacaacagggcggctgggagaagtgttaatcgtcaagtttgatttcaaaagtgatattgcctgatgcgctacgcttatcaggcctacaatgtgtgttgcaatttactgatttctttggatcttgtaggccggataaggcgtttacgccgcatccggcatgaagcaacgtactcgatattagcaatttggcggcaacccaaagttgccgattaatgattacttcgcatcggtcgccgtgccgttggcgtgccagtcaaatacgccgaactcaaagcctttcagatcgcctttctcatcccaggtcagcggtcccattacggtatccacggagttcgctttcaggtatttggcgatttcagccggatcgtcagactgattcaggcccgcctgcaaagattgcagcgcggcgtaggtggtccaaacgaatgcgccacttgggtcctgttttttcgctttgatcgcgtcaacaatgggtttgttcgccggaacctgatcgtagttcttcggcttggtcaccagcagcccttccgcactttcgcccgcaatgttagacaggctaacgttagccacaccttccggccccataaactgagttttcagccctgccgcgcgtgcctgacgcaggatttgccccatttccgggtgataaccgccgtagtaaacgaagtcgatattctcttttttcagacgcgccaccagcgtactgaaatctttttccccggcggtgatgccatcaaagaacaccacgtttgcattgcctttcttcaggccgtcctgcaccgctcgcgccagaccttcgccgtattgctgtttgtcgtgaacgatagcaatacgctgcggtttcactttctcaagaatatatttcgccgccgtcggcccctggtcggagtccaggccggtggtgcgcaggatcagctgatagccacgggcggtcagctccggcgcggttgccgctggggtgatcattaaaatgccttcgtcttcgtagatgtcagacgcaggctgcgtactactagaacagaggtgaccaatcacatatttaatgccgtcgttaacgactttgttcgccaccgcaaccgcctgtttcgggtcacaggcatcgtcatattttacgatttgcagtttgttgcctttaatgccgcctttagcgttgatatccgcaaccgcctgctctgcgccggtaaactcctggtcaccgtactgcgcaaccggaccggacattgcgcccacgaccgcgactttaatatcttctgccagagccatattgctgaatgccagcgcgatacatcctgccagtaacgctttaccctttatgttcatcctgagaatccccattcttctggttattacgtgtgttgtgatgttgtttttcagcactttatttcgttttatgcatgactacccgtgctttagcagcatactctgctaaaacatacccgatttttatgatattggaatagctattttgacagtttattaacaatctgcgtggggattggcgttttgccggaggggaaattgattattacagaggcccaaaaaacaaaaaccccggactctcatccagggttctctgcttaatagcggaaattacgcttcaatggcagcacgcaattttttcatcgcgttcttttccagctggcgtacacgctcagcggaaacgccgtaacggtcagccagttcctgcaacgtggacttgttgtcttcgtccagccagcgcgcacggatgatgtcctggctgcgttcgtccagaccctgcatcgcgtcggtcagacggtttgccgcctgctcttcccagttatcatcttcaatgccgtcggcaaagttagaacttttatcctgcagatagagcaccggagccatcggctggctgtcggaatcgtcgtcggaagacaggtcaaaggtcatgtcctgtgccgccatacgactttccatctcacgtacgtctttgctggttacgcccagttcacgggccaccatttcgacttcatcctggttaaaccagcccagacgctgcttggttttacgcaggttgaagaacagtttgcgctgcgctttggtggtcgcaactttgacgatacgccagttacgcagaacgtattcgtggatctctgctttgatccagtgaacggcgaaggagaccaggcgcacacccacttccgggttgaaacggcgcactgctttcatcaggccgatgttaccttcctgaatcaaatccgcctgtggcaggccatagcccgcataattacgagcaatatgaacaacaaaccgcaggtgagacaggatcagcgttttagctgcttccagatcgccatggtaatgcagcttttcagccagcgcccgctcctcgtcagcgctcaacatcggccacgcgttagctgcccggatgtaggaatccaggttgccaactggggctaaagctaaactttgcattttgtcagtcattcaaatcctctcaatcgatatcttctggcgcttcagtggtagcaacaactgtgccagagcttaagagcaacgaggttatcattcactgttttatcagaccgtgattttatccacaagttcaatgcaagcttgtgaataaattacgcacaaaatgtgacatagagatgaaataccgggaagagacaacggggtctctttccctgctacggaacccattgcagggaaagagtataacacgcttttattattcaggcgtaaagtggcgtaaatgttgtaccgtggcaagccacgctgccacccagccaatcatgctgcataccagcagcaatagcaggcattcatcgaaacttaagccattgatatcaaacttcgttccgaaaacctgtgccacttccgcaaccgcgctactcaatcgcagcaccagaatttcactcaaaattaaactcaacaatgcgccagaaaatcccagcagtgcgccaccatacaggaacgggcgcaggatgaatccatctgtcgcaccaatcagtttctgtacgttaatggagtcacggcgagcaaagatactcagacgcacactgttaccgatgacgaggaacacggccgccaccatcaacacgccgatcatcgcgctaacgcgcccgaccagcccggtcaacgccgccagacgggcaaaccagctgtcatccatccgcacttcgtcaatgccgttaatctgcgtgatacgatcacgcagcgtattcagactttccgtcccctggaaatcgagtttcgggatcaccaccgccactgccggaagcgggttttcttccagcatatccagcgcaccaccaaaaccagaccagttacggaactcacccagtgcgtcttcacgagaaagatagttcactttctccacgccttgctcggcctgcaactgtgccaccacgcccgcagcagcgtcatcgtccagcgttttttgcagataaacagtgatttgcggactcggataatactgcgtcgccgcctggttaacgtttttgtacaccatataacagacgctgggcagcgtcagagaaatggcgataaccatcaccgttaaaaacgtggcgaacggtttgcttttcagatcctgcaatgcgccgtggaaggcatagcgcacctgttcgttgaaaacgttggttttgcgatttaccggttttgggctggatttcgcgcgttttggtgcgttacgaccgccgtcgccactgccgccgacgcttttacggaagcgatcaagacgcccgccaaactgccgaatatgattgattgcatcgcgcttattcatggcccacgcctccatgcaagtgaccatcgctcagggtgagcatgcgataggaacgccggctgatcaggttgatgtcgtgcgttgccatcaatacggttaccccaacgcggttaaactcttcaaacagacgtaaaatgccttcgctcagcgcgtcgtccaggttaccagtcggttcgtccgccagcagtaccgcgggcttgttcaccaccgcgcgggcaatgccaacacgctgttgttcaccgccgctaagctgaatagggaagttcttcgctttgtccagtagcccgactttatccagcgccgcgctcacccggcgacgaatatcgtcaccgctggcaccggcgataatcagcgggatcgccacgttatcgtagacagtacggtccatcagtagatggtgatcctggaaaatcatgccaatctggcggcgcagaaacggaacttcacggtttttcagacgcgtgatgtcatggccgctaaaccagattttcccggcgctgggccgctcaatcccacagatcagcttcaggagggtacttttccctgcgccggaatgaccggtcagaaacgccatctcacccggctgcatatggaacgtaacgccctgcagcgcctgtctcccaccgagataagccttgctgacatgttcaaagcgaatcattgttaatcctctcgggcaaaaagtgcctctataaagtcgtccgccttaaacggacgcaaatcctcaatacgttcgccgacaccaatgtagcggatagggataccaaactggtcagccacgctgaaaattaccccgcctttcgccgtgccgtccagtttcgttagcgtgatgccggttaagccaacggcttcatggaacagtttggcctggcttaccgcgttctgcccggtgctggcatcaatagtcagcataacttcatgcggcgcttcaacgtcgagtttcttcatcacgcggacgattttcttcaactcttccatcaggtggcttttgttctgcaggcgtccggctgtatcggcaatcaggacgtcgatattacgcgctttagctgcctgaatggcgtcgaagataacagaggcggaatccgccccggtatgctgggcaatcaccggaatattgttgcgctgaccccagacctgaagctgttcaaccgcagctgcacggaaagtatcacccgccgccagcatcacgcttttaccctgctgctcaaactgacgcgccagcttaccaatcgtcgtggttttacccacaccgttgacgcccaccatcaggatcacaaacggcgctttgccttcaacattcagcggctcatcgactttcgccagaatctcgcccatctcttctttcagcaggccatagagcgcctcggcgtcacgaagctgcttgcgggatgcgccttccgtcagattggtgataattttacgtgtggtttccacacccacatcggcgatcaaaagctgctcttccagctcctcaaacagatcatcgtcgatttttttaccgcggaacaggctgataaatccggaaccgagattttctttggtttttaacaggctgcgtttcaggcgcgcgaaaaaaccttctttggtcggtttttcctgctcctgagcgatttcttccaccggctgctcttcttctgccggaggaaccaccatcaccgcctcttctgccgcttcggcagccagcgccgtttccagctcttcgtcggtaatttcttctttagccgcttcttcttccgccgcttcgacaatctctacggtttccgcttcagcctgccactcttctgggctaaccgcttcggcgttgacgtcttccggcaacggcagctcttcacgttcgatagccactggctccggcgtttcttctacgaccggttccggctgtgcaacgacttccgcttcaggctgcgctttttcactttcagcaacctgttcagtgacttccacaacgtcggcagcaaaagtttccgcctcggcttcagtatgcgcttgcggctgctcttcaacggcttgttcagaggccttcacaggctcttgcgcctgaacgatttcttctacaaccggttgttcattctgaacttctgtctctttttccggggtctgctctttttgaccaaagcccagccaggaaaaaaagccacgttttttttctttcgccatttgcgactacactcctcgctgttgcttcatggcacagcgttaacgctatgtacatagcagctaaaaaaatgatgaaatagtctatcacttaacttaattcacatcaccgcctgcaagtatgtgttatctggcggattgagcaatttatcatgaaaaaaccgaatcattccggcagcggccaaatccgcattattggcgggcagtggcgaggccgtaaactcccggttcctgatagcccaggtctgcgccccaccaccgaccgcgtacgcgaaacgttgtttaactggctggctccggtcattgttgacgcccaatgtctggattgcttcgccgggagcggcgcgctggggctggaagcgttaagccgctacgctgcgggggcaacgttgattgagatggatcgcgcggtttctcagcagttaattaagaatctggcgacactaaaagcaggcaatgcacgcgtggtgaacagcaacgcgatgagtttcctggcgcaaaaaggtacaccgcataatatcgtgtttgtcgatccaccgttccgccgtggcttgttagaagagacgataaatttactggaagataacggctggctggctgacgaagccctgatttatgtcgaaagcgaagtcgaaaacggtctgcccactgttccagcaaactggagtttacatcgggaaaaagtggcgggtcaggtggcttatcggctgtatcaacgcgaagcacaaggagaaagtgatgctgattaatattggtcgtttgttaatgctctgcgtttggggatttttaatcctcaacctggtgcatcccttcccacgcccgctgaatatcttcgttaacgtggcgctgatttttaccgtgctgatgcatggtatgcagctggcgctattgaaatccactttaccgaaagatggcccgcagatgaccaccgccgaaaaggtacggattttccttttcggcgtgtttgaactgctggcctggcagaagaaatttaaagttaaaaaataaccttattgttcgcctacaaagctgacaaagcgcgttcctttatagctcagcgtacctttatcgcccactgtcagggcgtggtactgctgggcgtcgaggcgaaacgtctgctccattcctccgctttgcggtttgaagcttgcctcatagcgtatactggtgcctgccggagtcacttcctgctggcggctacggcgatcgttaatcggtttttcccgcttgttgctcaccaccaccagcttttgctggagcggagccatatcattatcagctttttcccgtcgctgttgcataaaacgaaagcttgcggcgacgacaattaagccaatgataacaataaagaaaagaggtggtttgctcatctttatccctcatcggaaaatgcggaaataagcataccctgccagttatggtgttgtcatccgtccaccctcgccactaaactggaagcaagaccgtaggcattccgcttacgaaaaaataacgaattcaaggaactaagatgctttggagctttatcgctgtctgtctttccgcatggctatctgtggatgcaagctatcgtgggccaacctggcaacgctgggtgtttaaaccgttaacccttcttctcctgctgttactggcctggcaagcgccgatgttcgacgccattagctatctggtgctggcagggctgtgcgccagtctgctgggcgatgcgctaaccctgttgccacgtcaacgtctgatgtacgccatcggcgcgtttttcctcagccacctgctgtacaccatctatttcgccagtcagatgacgctctctttcttctggcctctaccactggtgctgctggttctgggtgcgctgttactggcgattatctggacgcgcctggaagagtaccgttggcctatctgcacgtttatcggcatgacgctggtgatggtgtggctggcaggtgaactgtggttcttccgtccgaccgctccggcgctctctgcgtttgttggcgctagcttgctgtttatcagtaactttgtctggctggggagccactatcgccgacgcttccgtgcggataacgcgattgctgcggcctgctactttgccggtcacttcctgatcgtccgcagcctgtatctctgataaaacttgactctggagtcgactccagagtgtatccttcggttaatgagaaaaaacttaaccggaggatgccatgagcactcctgacaatcacggcaagaaagcccctcaatttgctgcgttcaaaccgctaaccacggtacagaacgccaacgactgttgctgcgacggcgcatgttccagcacgccaactctctctgaaaacgtctccggcacccgctatagctggaaagtcagcggcatggactgcgccgcctgtgcgcgcaaggtagaaaatgccgtgcgccagcttgcaggcgtgaatcaggtgcaggtgttgttcgccaccgaaaaactggtggtcgatgccgacaatgacattcgtgcacaagttgaatctgcgctgcaaaaagcaggctattccctgcgcgatgaacaggccgccgaagaaccgcaagcaagtcgcctgaaagagaatctgccgctgattacgctaatcgtgatgatggcaatcagctggggtctggagcagttcaatcatccgttcgggcaactggcgtttatcgcgaccacgctggttgggctgtacccgattgctcgtcaggcattacggttgatcaaatccggcagctacttcgccattgaaaccttaatgagcgtagccgctattggtgcactgtttattggcgcaacggctgaagctgcgatggtgttgctgctgtttttgattggtgaacgactggaaggctgggccgccagccgcgcgcgtcagggcgttagcgcgttaatggcgctgaaaccagaaaccgccacgcgcctgcgtaagggtgagcgggaagaggtggcgattaacagcctgcgccctggcgatgtgattgaagtcgccgcaggtgggcgtttgcctgccgacggtaaactgctcagtccgtttgccagttttgatgaaagcgccctgaccggcgaatccattccggtggagcgcgcaacgggcgataaagtccctgctggtgccaccagcgtagaccgtctggtgacgttggaagtgctgagtgaaccgggagccagcgccattgaccggattctgaaactgatcgaagaagccgaagagcgtcgcgctcccattgagcggtttatcgaccgtttcagccgtatctatacgcccgcgattatggccgtcgctctgctggtgacgctggtgccaccgctgctgtttgccgccagctggcaggagtggatttataaagggctgacgctgctgctgattggctgcccgtgtgcgttagttatcagtacgcctgcggcgattacctccgggctggcggcggcagcgcgtcgtggggcgttgattaaaggcggagcggcgctggaacagctgggtcgtgttactcaggtggcgtttgataaaaccggtacgctgaccgtcggtaaaccgcgcgttaccgcgattcatccggcaacgggtattagtgaatctgaactgctgacactggcggcggcggtcgagcaaggcgcgacgcatccactggcgcaagccatcgtacgcgaagcacaggttgctgaactcgccattcccaccgccgaaagtcagcgggcgctggtcgggtctggcattgaagcgcaggttaacggtgagcgcgtattgatttgcgctgccgggaaacatcccgctgatgcatttactggtttaattaacgaactggaaagcgccgggcaaacggtagtgctggtagtacgtaacgatgacgtgcttggtgtcattgcgttacaggataccctgcgcgccgatgctgcaactgccatcagtgaactgaacgcgctgggcgtcaaaggggtgatcctcaccggcgataatccacgcgcagcggcggcaattgccggggagctggggctggagtttaaagcgggcctgttgccggaagataaagtcaaagcggtgaccgagctgaatcaacatgcgccgctggcgatggtcggtgacggtattaacgacgcgccagcgatgaaagctgccgccatcgggattgcaatgggtagcggcacagacgtggcgctggaaaccgccgacgcagcattaacccataaccacctgcgcggcctggtgcaaatgattgaactggcacgcgccactcacgccaatatccgccagaacatcactattgcgctggggctgaaagggatcttcctcgtcaccacgctgttagggatgaccgggttgtggctggcagtgctggcagatacgggggcgacggtgctggtgacagcgaatgcgttaagattgttgcgcaggagataaggcaaaccgatcgcaacattgagcgcgatcggtcccctcgcccctctggggagagggttagggtgaggggaaaaggcggcatcgaagccaatcagcccctatcaaccgcctttacgaatcaaataacgataaggcagtccatccgtctctttagcaaccagttcgtgttccataaaggtacaaaacccaggaatatcgcgggtagtggccggatcgtcggcgataatcagcaacgtttcgccaggctgcatattgcgcacggttttgcgcaccatcatcaccggttccgggcagcgcaggccaagcgcgtcgagtgtgtggtcagggctggaaaagagatcggtcattttcttctcatcacttaaaaaaacggcgctagtttacgccctgtgagtccgtaagcaaactaggttaacgattgcgtgaaaattaaccattgcattgtcaacgtaaagcagtatcatgcggcggctcgaaaaaagggtaagcacgttattatgttaaggtaacagacgtgtcgtacgtattgggttccctcaccccaatggttaatcaaaaaggtacaatatgaacgttttcagccaaactcaacgctataaggcgttgttctggttaagcttatttcatctgctggtgatcacctccagtaactatctggttcagcttcccgtctccattttgggtttccataccacctggggcgcgtttagctttccgtttatttttcttgctaccgacctgaccgtgcgtatttttggcgcaccgctggcccgacgcattatcttcgcggtaatgatccctgcgttattaatctcctacgtcatcagcagcctattctatatgggttcctggcagggattcggcgcactcgcccacttcaacctgtttgtcgcccgtatcgccaccgccagtttcatggcctacgcgctggggcaaatcctcgacgtgcacgtttttaaccgcctgcgtcagagtcgccgctggtggctggcaccgacagcgtccacactgttcggtaacgtcagcgacacgctggcctttttcttcattgccttctggcgtagcccggatgcctttatggctgaacactggatggaaatcgcgctggtcgattactgtttcaaagtgttaatcagtatcgttttcttcctgccaatgtatggcgtattactcaatatgctgttgaaaagactggcagataaatccgaaatcaacgctttgcaggcgagttaaaggttcgttatcagagttgtgataagatggatgaatgagccgttatggccgtttatcgaaaggaagaagtcaatgcgcaatctggttaaatatgtcggaattggcctgctggttatggggcttgcggcctgtgatgataaagacactaacgctacggcgcagggtagcgtcgcggaaagtaacgctaccgggaatcccgtcaacctgcttgatggcaagttaagtttcagcctgccagcggatatgaccgaccagagcggtaagctgggaacgcaggccaataacatgcatgtctggtccgacgccaccgggcagaaagcagtcatcgtcatcatgggcgatgatccgaaagaagatctggcggtgctggcgaagcgtctggaagatcagcaacgtagccgcgatccgcagctgcaagtggtaaccaataaagccattgagctgaaaggtcacaaaatgcagcagttagacagtattatctccgcgaaaggccagacggcgtactcttccgttattctgggtaacgtgggtaatcaactgctgaccatgcaaattacgctgcccgctgacgatcagcaaaaagcgcagaccaccgcagaaaacatcattaatacgctggttattcagtaagttttaagaactactggcggcctcagggacgtgttccggaggccgtttttttaatcgccacgtcagtaataacgcgattgcgaccagtcccgccgccgccagataaatcaccggtacgcccgcccagctcatcaccagcccagccagtggtccagtcacgccaaggcttaaatccataaatacggtgtaagttgccagcgccgccccctgattttgctgcggaaccgcttttaccgccactacacccaatgccgggaacaccaggctaaacccggcccccgccagtaagacgccgattttcgccatccacggcatagtcgccacgccaaccagtagcaggccgattatctcaacgctaaagcaaatcatcgctacgtttaagccaccgatacggttaatgccgttagggaataacaaacgcgtaccgacaaacgcacagctaaacagcgtcagcgcgaaagccgcaccgtcccaacctttagcgtcataaaacagcgtgataaaggtggcgatgacgccaaatccggcggaagccagtgccagcgccataccgtacagccagacgcgcccaagcaccgcgcgaaacggcagcggtttgcctttactggcttttaccgtcggacgcgggatcgccaacaaaatggccaccagcgccacgcccataatgattaacgctaacgcctgcaagccgccccagtgataaaacacgacgcctaacggcgcacccatcgccatcgccccgtaagtgacaatgccgttccagctaatcacccgcccgatatgcaggctgccaaccacgccaacgccccatagggtgcttcccgttccggcaaaactttgcccaatcccaaggatgacgcgccccaggcaaagtaataacaggctgatgacaggcagactggcggttaatcctgccgtcagataccccagaccgctcaaaaagcagccgcataaaccgaagacgacaatctttttgggtcccaggctatcggcgtaacgtccggcatgagggcggctcagcaaggtggcgaaatattgcaggctgataaccaatcctgcccagaaggcgctaaagcccatcacatcatggacatagcccggtaatacagcgagcggcaacccgatggtgaggtagctggcgaagttaaacatgactatagagacaatgcgcaaattcaggcgcaatccgtttagcgcgggttcggctacgggttcgggcatgaggatcaccacatttttacaacagtgtttcatttttaccacgtgctgacgtgaaaatcagcagtaagaatcagaatattgctggcgtgactcccgctacacttaatacaaaaagtcacaaggaagccccaatggaaacccctcaacccgataaaacgggcatgcacattctgctcaagctggccagcctggtagtgatcctcgcgggcattcacgcagcggcagatatcattgtgcagctgttactggcgctgttttttgccatcgtcctcaacccgctcgtcacctggtttattcgtcggggagtacaacgccccgttgccattacgattgtagtggtggtgatgctgatcgcactaaccgcgctggtcggcgtactggcggcaagctttaacgaatttatctctatgctgccgaagtttaataaggagctgacgcgcaaactttttaaattgcaggagatgttgccttttcttaatttgcatatgagcccggagcgaatgctgcagcggatggacagcgaaaaagtggttaccttcaccacagcgctaatgaccgggctttccggggcaatggcgagcgtgcttttgctggtgatgaccgtagtttttatgctgtttgaagtgcgccacgtcccttacaaaatgcgttttgcgctgaataatccacagattcacatcgcgggattacaccgcgcacttaaaggcgttagccactatcttgcattgaagacgctactcagtttatggacaggtgtcatcgtctggctggggctggagctgatgggggtgcagtttgcgctgatgtgggcagtactggcgtttttgctcaactacgtgcccaatatcggcgcggtaatttccgccgtaccgccaatgattcaggtgctgctgtttaatggtgtttacgaatgtattctggtcggcgcattgtttttagtggtccatatggtcatcggcaatattttagaaccacggatgatgggccatcgcctggggatgtccaccatggtggtatttcttagtttgttaatttggggatggctgctcggcccggtagggatgctacttagcgtgccattaaccagcgtgtgtaaaatctggatggaaaccaccaaaggcggtagcaaactggcgattttactggggccgggcagaccgaaaagtcggttaccgggatgaggcgacaagtgatacgatacgcactttcattttccattaaacgttggccctgatatgtatcggatagttctggggaaagttagcaccttaagcgcagctccactgccaccgggtttacgcgagcaagcaccgcaaggtccacgacgcgaacgctggctggcggggcgtgcattgcttagccacacgctttccccgctaccggagatcatctatggcgaacaaggcaaacctgcatttgcgccggaaatgccgctatggttcaacttaagccatagcggtgacgatatcgccctgctgttgagtgatgaaggcgaagtcggctgcgatatcgaagtgattcgcccgcgcgccaactggcgctggctggcgaacgccgtattcagcctcggggaacacgctgagatggacgccgtgcatcctgatcagcaactggaaatgttctggcgcatctggacgcgcaaagaagccatcgttaaacagcgtggcggcagcgcctggcaaatcgtcagcgtagacagcacctatcactccagcctgagtgtcagccattgtcagcttgaaaatttaagccttgcgatctgcacccctactccctttacgctcaccgccgacagtgtgcaatggatcgatagtgttaactgatccgcccacccgactgcccatctattgatccagaacaggtaatcagtatgacgaatacttaaaatcgtcatacttatttccgccatctattttaatccattggggttaccatgctctccacactccgccgcactctatttgcgctgctggcttgtgcgtcttttatcgtccatgccgctgcaccagatgaaatcaccaccgcctggccggtgaatgtcgggccactaaacccgcacctttacacgcctaaccagatgttcgcccagagcatggtttatgaaccattggtgaaatatcaggcagacggtagcgtgatcccgtggctggcaaaaagctggactcatagtgaagatggtaaaacctggaccttcaccctgcgtgatgacgtgaaattctccaacggtgaaccgttcgatgccgaggcggcggcagaaaacttccgcgcagtgctcgataaccgtcaacgtcacgcctggctggagctggcaaaccagattgttgatgttaaagcactcagtaaaacagagctgcaaattaccctgaaaagcgcctactatcctttcctgcaagaactggccctgccccgtcctttccgttttatcgctcccagccagtttaaaaaccatgaaaccatgaacggaattaaagcgccgattggcaccggaccgtggattttgcaggaaagcaaactgaatcagtacgatgtcttcgtccgtaacgaaaactactggggcgaaaagccagcgattaaaaagatcacctttaacgtcatcccggacccgactacccgcgcggtggcgtttgaaactggcgatatcgacctgctgtacggaaacgaagggttattaccgctcgataccttcgcccgctttagccagaatccggcttaccacacccaactgagtcagccgatcgaaaccgtgatgctggcgctcaataccgccaaagcccccaccaacgagctggcagtacgtgaagctcttaattacgcggtaaacaaaaaaagcctgattgataacgcgttgtatggcacccagcaggtcgccgacaccctgtttgccccttctgtgccctacgccaacctcggcctgaaaccgagccagtacgatccgcaaaaagcgaaagcgttgctggaaaaagccggttggacgctgcctgcgggcaaagacatccgcgagaaaaatggtcagccgctgcgcattgaacttagcttcatcggcaccgatgcgttaagcaaaagcatggcggaaatcattcaggctgatatgcgccagattggcgcagatgtcagcctgattggcgaagaagagagcagtatctatgctcgtcagcgcgacggtcgttttggcatgattttccaccgcacctggggcgcgccatatgatccacacgccttcctcagtagtatgcgcgtaccgagtcacgctgacttccaggcacagcaaggattagccgacaaaccgctgattgataaagagatcggcgaagtgctggcgacccatgacgaaacgcaacgtcaggcgctgtatcgcgacattctgacccgtctgcatgacgaggcggtttatctgcctatcagttacatcagtatgatggtggtaagtaaaccggagctgggtaacatcccctacgcgccgatcgccaccgaaattccgttcgaacagattaaaccggtgaaaccttaatgttgcgttacgtattacgccgctttctgctgctgatcccgatggtgctcgccgccagcgtgatcatttttctgatgctgcgcctcggtaccggcgacccggcgctcgattatttgcgtctgtctaacctgccgccgacgccggagatgctggcctctacccgcaccatgctgggactggatcagccgctgtacgtccagtacggcacctggttgtggaaggcgctgcatcttgactttggtatcagtttcgccagccaacgcccggtactggacgatatgctgaacttcctgcccgccacgctggaacttgcaggtgcggcgctggtattaattctgctcacttccgtaccgctcggtatctgggcggcgcgccatcgcgaccgtctgccggatttcgccgtacgtttcatcgcgtttcttggcgtgagcatgcctaacttctggctggcgtttttactggtgatggcgtttagcgtgtatctgcaatggctacccgcgatgggttacggcggctggcagcacatcattttgcctgcggtttccattgcctttatgagcctggcgattaacgcgcgtttactgcgcgccagtatgctggacgtcgccggtcagcgtcacgtcacctgggcgcgtctgcgcggcctgaacgacaaacagaccgaacgtcgccacatcctgcgcaatgccagcctgccgatgatcaccgccgtggggatgcatatcggcgaactgattggcgggacgatgattatcgaaaacatctttgcctggccgggcgtcgggcgctatgcggtgagcgcgatttttaaccgtgactatccggtgatccagtgctttacgctgatgatggtggtggtttttgtggtctgtaatttgattgtcgatttgctcaacgccgcgctggacccgcgcattcgtcgtcatgaaggagcgcacgcgtgaactttttcctctcttcccgctggagcgtacgcctggcgctgatcattatcgccctgctggcgctgattgcgctcaccagccagtggtggctgccgtatgacccacaggcgattgatttgccgagccgcctgcttagcccggatgcgcagcactggctgggcaccgatcacttaggtcgcgatattttcagccggctgatggcagcgacccgcgtgagcctcggtagcgtaatggcctgcctgctgctggtgctgacattagggctggttattggcggcagcgccgggttgattggcgggcgcgttgatcaggccaccatgcgcgtcgccgatatgtttatgaccttcccgaccagcattctgagcttctttatggttggcgtgctcggcaccgggctgaccaacgtaattatcgccatcgccctgagccactgggcgtggtatgcacgcatggtgcgcagcctggtgattagtctacgccaacgcgagtttgtgctggcgagtcggctttccggtgcgggccatgtgcgggtgtttgtcgatcatctggcaggcgcggtgatccctagcctgctggtgctggcaacgctggatatcggccatatgatgctgcacgtcgcggggatgtctttccttggcctcggtgtgaccgcgccgaccgccgaatggggcgtgatgattaacgacgcgcgccagtatatctggacccagccgctgcaaatgttctggccggggctggcgctgtttatcagcgtgatggcctttaacctggtgggtgacgcactgcgcgatcatctggaccctcatctggtgacggagcacgcacactaatgccgcaacagattgaactacgtaatatcgcgctacaggccgcgcagccgctggtacacggtgtaagcttaaccctgcaacgcgggcgcgtgctggcgttagtcggcggtagcggcagcgggaaaagtttaacctgcgccgcaacgctgggcattttgcccgctggcgttcgccagacggcgggggaaattttagccgatggcaaaccggttagcccttgcgccctgcgcggcatcaaaattgccaccatcatgcagaacccgcgcagcgcctttaatccactgcacaccatgcacacccacgcgcgggaaacctgcctggcgttagggaaacccgccgatgacgctacgcttaccgctgccatagaagcggtggggctggaaaacgccgcgcgcgtgctgaagctgtacccgttcgagatgagcggcggcatgttgcagcgcatgatgattgcgatggcggtgctgtgtgaaagtccgtttatcatcgccgatgaaccgaccaccgaccttgacgtggtagcacaggcgcgcatcctcgatctgctggaaagcattatgcaaaaacaagcgccgggaatgctgctggtgacccatgatatgggcgttgtggcgcgtctggcggatgacgtggcggtgatgtctgacggtaagattgtcgaacagggcgatgtagaaacgctgtttaacgcccccaaacatacagtgacgcgcagcctggtttccgctcatctcgccctctacggtatggagctggcaagttgacctaatacggtatggagctggcatcatgactttacttaacatctccggcctttcccatcactatgcgcacggtggatttaacggaaaacatcaacatcaggcggtgctgaataacgtttccctgaccctgaaaagcggcgaaaccgtcgccctgctggggcgcagcggctgcgggaaaagtaccctcgcgcggttgctggtgggtttagaaagccccgcgcaggggaatattagctggcgtggcgaaccgctggcgaaactcaatcgcgcccagcgtaaagcgttccgccgcgatattcagatggtatttcaggactccatcagcgccgtgaatccgcgcaaaaccgtgcgcgagatcctgcgtgaaccgatgcgccacctgctaagtctgaaaaaatccgaacaactggcgcgcgccagcgaaatgctgaaggcggtcgatctcgatgacagcgttctcgacaaacgcccaccgcagttaagcggcggccagctccagcgcgtctgcctggctcgcgcgctggcggtcgaaccgaaactactgattctggatgaagccgtttctaaccttgatctcgtgttacaggcgggtgtcattcgcctgctgaaaaagctacaacaacagtttggcaccgcctgcctgttcatcacccacgacttacgcctggtagaacgcttttgccagcgggtaatggttatggacaacggacaaatcgtcgaaacccaggtggtgggagagaaattaaccttttcctctgacgccggacgtgtgctacaaaacgcggtattacccgcattccccgtgcgccgtcgcaccacagaaaaggtttaacgcaaatgcaacgagtcaccatcacgcttgatgacgatttactggagacgctggacagcctgagccagcgtcgtggttataacaaccgttccgaagctatccgcgacattctgcgtagcgccctggcgcaagaggccacccagcagcacggcacgcaaggtttcgcggtgctgagctatgtgtatgaacacgaaaaacgcgacttagccagccgcattgtctccacccagcatcatcaccacgacctctccgtcgccacgctgcatgtgcacatcaaccacgacgactgtctggaaatcgccgtgttgaaaggtgacatgggtgacgtgcagcattttgccgatgacgttatcgcccagcgcggcgtgcggcacgggcatttgcagtgcttgccgaaggaagattgagttacgccattgtcccaatcgtcttcctgaatcgcagcagcgcaatggtgaaaaatgcgccgccaattgccatcagcgtcagaaactgcggccagacgatttcgaatccggcaccccggtagaggatggcctgcgcgaggctaacaaagtgtgtcgtcggcatggtcagcataatgtcctgcaccatctgcggcatactttcgcgcggcgtggaaccaccggaaagcatttgcagcggcagcagcaccagaatcaccagcagccccagttgcggcatactacgcgctatcgtccccataaaaatgccgatactcgtggtggcaaacagactgagcgccacgcccagcataaacagcgggatgctgccttcaatcggtacgcccagtacacctttcaccatcagcaccaggcttaatccgcttaccaccagcaccaccagccccatgctccagatcttcgccatcatgatctcaaacggcgttatcggcatcaccagtaagtgttccaccgtgccgtgttcacgctcgcggatcagcgcgcttccggtcaatacaatcgccagcatggtaatgttgttgatgatcgccatcaccccgccaaaccacgcgggatcgaggttcgggttaaagcgcatccgggtttccaggcttaccaacggttcgctgttatcacggtagcgcgcgacaaagctgttcacttcaccgttgataatattctggatatacccattgccggtaaatgcctggctcatgcgcgtggcatcgacgttcacctgaatatccggctggcgtccggcgaggacatcacgctgaaaattaggcggaatatttatcgcgaaggtatagcgtccggcgtccagtccggcatccatctcatcggcggtgatcatctccggtggcaaaaaccacggacgatagaagctgttaacgatccggttgcttaactggctttgatccatatcggcaatggcgatcggcgcgaggttcaagcttcctggcgtaacggtcgcactgctatacacgctcaccgtaaagctgaagacaatcagcgtcagcatcgctttatcaccgagcagactgcgcaactctttgatacccagattaaaaatattgcgtaaatggcgcatcatccctcctgttttttcagcagcaggatacttaagcccatcaccagcgggatggctatcagtaacgggataaaaagttgccacaaatcagtcagatccagcgctttgctgaacgtcccgcgggcgatagtcagaaaatgactggtcgggtaaacctcgccgatccaacgtccaggcccttccaggctagctaccggatcgatcatcccggaaaactgtgtcgccgggatcaacgtgataatcgccgttccgaaaatggcggcaatctggcttttcataaaggtggagatcagcagccccattccggtggcaatgatgatatacagcagcgccgccagggtgagcgtcaggaaactgcctttatgcggtacgccaaacacaaacacgctcaggccgcagagcaggaaaaagttcagcatccccagcgcgatgtatggcaactgtttaccaagcaaaaattcactacgcgtggtgggggtcacgtaaaggttgataatgctcccaagctctttttcccgcaccacgctaagggcgcttagcatactcgggatcatcatcagcagaagcgggatcaccgccggaacaatcgctggcaggctttttacgtccgggttatagcgatagcgcgtctcaatattcatcagcccgctttggctggcgggtgtgctttgtcggctcgccacatcctgtaaccagctctggtgcatggcctgcacgtaaccttttaccgtttcagcacggctcggcatcgctccgtcgatccagacgccgagttccacaggcgtaccacgcgcgatatcgcgcccgaaattgggcgggatctcaatcgccaccgtgatatcgcccgcacgcatccgacgatcaagctcgtcataactggtgagcggcggctgttcgataaagtaacgggaaccggagaggttgagtgtccacgcctggctactgacggtctggtcgcggtcgagcaccgcaaagcgcaggttttccacatccatactgatgccgtaacccattatcagcatcaggatcaccgttcccatcagcgccagcgtgctacgtactggatcgcgtcgcagttccagcgcttcgcggcggctgtagctaaacagacggcgcaggctaaatccctgacgcggcgcgtgggtggtgtcgtgtaccacgggcggcgcttcggcttcgttgctctgccctgccgcttcctgcaaataggcgataaatgcctcttccagactggcggctccgcgtttctcaaccagttcctgcggtgtaccgctggcaagcacttttccggcgtgcatcagactgatgcggtcgcaacgttccgcttcgttcataaagtgggtggagatgaagatagtcactttgtcctggcggctgagatcgaccatcaactgccagaacatatccctcgccaccggatcgacaccagaagtaggctcatcgaggattaacatctccgggcgatgaatcaccgccaccgccaggctaagccgctggcgaatgccgagcggcaaactctccggcagaatatcttcaacgtcgttgagcttaaaacgctcgctcatttcagccactcttgcgggaatttccgcttccgggatgtgaaacaaacgggcatgtaactcaaggttttgccgcacggtgagttcgttatagaggctaaacgcctggctcatatagcccacccgacggcgggtatcgatatcttttggatcaaccggttgcccgaacagccacgcctcaccttcgctggcgggcagcagtccggtgagcattttcatggtggtggatttaccgcagccgttgctaccaagaaaaccaaaaatctccccgcgtggaatgcggaaattaacgtgatcaacggcaacgaaggaaccaaaacgcatggtcagatcgcgcgcttcgatggcaatctctgcgttttcaggttgatacggtgggatcactaccgcctgatgcgcctggcgttgcgcttgcggtaacagatttataaatgcttcttccagcgtagcgctttgcgtttgctgccgtagctcttcggcgctgccagttgccagcacttctccggcattcatcgctaccagccagtcgaagcgttcggcctcttccatataggcggtggcgaccagcacgctcatattgctctgccgctggcgaatactgtcgatcagatcccagaactgggagcgggagagcgggtcaacccccgttgttggctcatcaaggatcaacagttccgggtcgtggattaacgcgcagcacagcccaagtttttgcttcatcccgccggagagtttccctgccggacgatcgcgaaacggtgctaacccggtgctggtcagcagctcattgattcgcacttcccgctccgctttgtcgtgaccgaacaggcgagcgaaaaaatcgacgttttcatacacgctcaaggtgtggtagaggtttttgcccagcccctgcggcatccaggcgatgcgcgggcagacgtcgcggcgatgcttcgggtcgcgcatatcgccgcccagcaccatcacattgccctgttcaatgacgcgggcaccggaaatcaagctcaacaagctgctcttcccgacgccgtccgggccaatcagcccgaccatacagcgggccggaatatcgagagtgatattgttcagcgcaacggtttttccataatgctggctcacgcccgccagttgcgcgacaggcgggacgggaaccagttccagatgcgtcattgcggcaacctcaccacgaggtcgtcaggccacggaagttcttcattcacccgcacccacgctacgcccggcaaaccggttttgacatattccagatgctgctggagtaattccggtgggatacgcgctttgacgcggaacatcagtttcagccgttcatcgctggtttcgacggtttttggcgtgaactgggcgacactggcgacaaaactgatggttgcaggaatacgcagatctggcgcggcatcgaggatcagccgggcttcaccgcccagtttcagcgtgcccgcctgttcggttggcaggaagaaagtcatatagacgtcgctgagatcgaccatattcagcacccgaccgcctgccgccagcacttcgcctggctcggcaacccgatactgcacgcgtccgtcacgcggggctttcagttcgctgtcatcgatatctgcggcaatgcgccgttcagtggcttgtgccgcttcgacgcgggtttgcgcctgaatgatattggtgcgtgccgcttctatagccgctttagaagcgcttacctgagctttcgcgctttccagcgcagctcgggcgctctcagcggcggcgcgatcgtcatccagctgttgcgcagaaatagcccctcgttgggccagactacgggaacgcgtatgacgttttgctacggagtccagttctgcctggcgttgattaaccaggctctgtgcggcacgagtttcgctttgtcgttgctccagcaaagcctgcgcggcagcaacggcgctttgtgcctctttgatttgcgcgatggcttccagtcgctgttcctgcaacacgcgagtatccatcttcgccagcacttcaccttcgcgaacaaacttgccttctttcaccagaatggtgtcgatacgcccggcaattttgctggcaatatccacttccgtcgcttcaatgcgcccattactgacagcaaagccttccggcacacctgccgggcgcaacagccaccacgccacgatagccgccaccgccagtaacccgacaacccaccacgccagatggcgcttactcttatccataatcgacccgccataatccctgtaagcaaacgacgcgtgttacaactgccgccgaacgacgttcagcggattcttccatccgggataagaaggaaacggcaaatacgaccagcgcgcagagcattgagcgccaacggggaaggcttagtgaaaacgggtagtaatgttgtcatcatcagcattcctggccgtaaatgaaacacgcatactcataagtgtgatctataaaactggctgacaaaacggtatccatcctgttggatagcgtttcacgcctgttcagttgcaggaacagagcattcctttttacgttttatcaacagtctcaaccagatagtaacattaatattcatgttgtctatggttcagagctgtaacattgtgcgccttctaatcaaaggcataagtccatttctgtttttttcatgctggtaagacttccagggagtggttatctcaggccctgcaccagggttaatttggcaattatgcatgctgaacattcttccagcatgtttactgtcacgggcgttaagacctaaaactgtccccgtttcgcctatgcgttctcttccaccatttccgttatgtgcaacaacttgatttatacctaacatttgactacatgctaatagtgcttcaagtttaggtctgtaatctgtgctaacagaaaaataacgattaaaggatcgacaagagatagcccggctagttttaaactttttgccattaattatagcatgatgctttttattgataattgccgctaattcgaccggatcgagagcattggtcatttcatcaatagagactgttatcggtcctataatgtaacgttttcgctgatcatcaaaagttatcccatgatgatttgccattattttgtatttggggtcatagaaacatacaggataatcttttatcccagagtaggtatcctcatcgagtggtttcatacgcgtgaagttctgcatatagttaccattgcaattcgtttcatgatttccagctaatacatgaacattttcattgatactcattatgcgttttaacaaatcgatgataaattgatcaccacagatattgctaaatcgatcgccggtttggtcgcccagaaacgtacatggcgtcacagcgtctttattaataactaaataaggctgaagactttctaaaataatgtctcttctgttcaggatactgattattgtattaacattagtgttaagttgctcattaaagttctcccttagcaatacgttgagaacttcatcttctatattaagcaactggctaaggaaattttctccttcagccatgattcccaaatgtcccgttgcgaaaagcgcgaacaaaactgcaccgacactgccatcggtatcaccaaaataggttggtctggtacttgtgggatcaacgggtaaacaattggagaaatagattctgtcagcgaactggggttttatcattgtttcgaatttaatatcagatacattatattggcttattttccagttccagatgggtttgtagctctcagtaactgcaacatcattagcattatcatttactgtcatattattaagtaaataaacaatactgcaccaattaatatcggtattatcaagagagcaaccgtaatttttgctattaattgtcacaataaactgataattattattcctacgtagaatatgagcacgcatgccgcttagcatactatatttttcactatgatccgtttgtatggtaaaactaattttgtcatcttgaatagattgttggaaccgttctatttgccaatcatctattttttccacaacctcaccgagcattgtcctggcaatactacttatatcatcacctataccatttgcaatatacccaaacagttctttagtgaagttggtaacatgctcttgcaccatatcatttgttgcgattgtcgttgtactgtcgttagtgcctgccacagttccaattttcatattttacctcatattatttaccgcgaggaatacatagttaacattttatcttatgacatacacctcatgttcgatgggaaaataattatattttgcacaaatcattcagcctcaaagcataatatgaaatttcttatctcatagcagagaaagtccctaaagattgtagaggcgtcatcagaacatgcctctacaatcgattaagaaaacctatgaaatactggcaggattaaaaagacataccaccgtattcatggagttttaatgtagttgaaaacaactaagcccactggaataaattattttattatttttatcacgtgcttccttcagggaatttagccccataataccattatcaaattgttgattatgatctaccccgggcccatgatgcccatatttttgtctaatgtatttgctggggtcttcacctttgagtgtctccccacatatgaagatacgttcacgtgctggtctgaaatcagtagtgttatcaaaataattagcatatacaggtgtgggtttcaaagtattgcttcggattagatggaatagaggatcatccatgtgttctttatgttttttattaaaaatattggctaattcctcaggatcagtaggatttttcatctgattaaatggaacctgcaaagcacgctgacaataacatttttttcttcatctcttattattccgtgatgactggttaaaacttgcctttcactgtcataattacaaacatcgagcgttttaattaagttatacgtatcaccggcagagagtttatgatttgctagtcgtgcagtatagttaccattaaaattgatttcatgatttccagccagaacgacgacatttttattaatacggctatctttattaccctccatatttcgcatagaatttagcaaagtaaggatatatttatcaccaaaaatagtactaaatctatcgcctgtatgatccccaaggaagatacaaggggttatcgcatcgtcctttaaaaaaacatgttgatgcaactcattcaagatcatgtctctcgtatttaataaatcgtagagcactttattatttttatgtttgtatgcagaactagccatctcttcgtgttttaataattcacataataaactccaacccttttccctgatgcctatatgcccactaacgagcaatgcataaagtacagcgcctactcttccatctgtatcgccaaaataagccgtgttggcattttgtgggttaatcacgccacactgtttatagaagtctattttactaaacacagatttaacatagctatcaaacttttccttagtaaacgtctctttagagacatcccaacgccagtcaggtttgaaattaccactaagaagagtaaagaaatttctcgctatgatagaaagcccatcaactttataaattatatcacttttatctccagaggaattaataaaataataaccgcccttacactcaacagtaacggtaatgggagagcttaattttaacacatggttattgtctggtataattgtaaagataaacgtatcagtagtattgtcggcgaatctattatattcttgaatatctatagaaggttcactattataaaaccatactttctccatctggtgactacgatcatttaccttccagtgaccatgttgcaggaaatagatgatatgcaggccaaaatcgttatctatttggctatcattatccagtttatcaaattcaactatctttgcacgatgtgttttatcaaccttgccatggtgttgatgactgttaactttatcactatgcttatcttgatggctactagagatgtttctaatctgattgtcaattgctttcataaataacctgtgatatttttgaattgtttgtaacaaaataaatgatacttgtctgaaaaacagatttacgacgatataaaataataatacttatatgttcgctgattttaagcaccgagactatccggtcttttaccaaataatgaagaataatccctccctggaagataattgtaaaaaacaacagcataagaattaatcttaggataaatttttatttatcatggccttttgaacgctgaaaagtagcgctctgcaaagtaaaccccgctatagttatgctatgcatttgtctttaatgatatctcgtcattatattaacaggatgaaattatcattaatgcatatttcaatattagcagggatacctgaggagtttaaagtgaacatatatatcgggtggcttttcaaattaatccctttgattatgggcttaatttgtatcgcgttaggtggctttgtgctggaaagtagtgggcaaagcgagtatttcgtcgcgggtcatgtgctgatttctctggcggccatatgcctggcattattcactaccgcatttattatcattagccagctcacgcgcggcgttaatacgttttacaatacattgttccccattattggctatgcggggagtattatcaccatgatatggggttgggcactgttagcaggcaatgatgtgatggcagacgagtttgtcgccggccatgttattttcggcgttggtatgattgccgcctgtgtaagcacggtggcagcgagttccggtcactttctgctcattcccaaaaatgcagcggggagcaagagcgacggaacaccggtacaggcttattctagtttaatcggtaactgcctcattgccgttcccgttttactcaccctgctcggtttcatttggtctattacgctgttacgtagtgctgacataactccgcattatgtcgcgggtcacgtattgcttgggttaaccgcaatctgtgcctgtctaattggccttgttgccacaattgtccatcaaacacgtaatacgtttagtactaaagaacactggctgtggtgttattgggttatttttctcggcagtatcacggtactgcaggggatatacgtcttagtcagttccgatgcaagcgcccgactggctcccggcattattcttatttgcctcggaatgatctgttacagcatattcagtaaagtctggctactggcactggtatggagacgtacctgtagcttagccaacagaataccgatgattcccgtcttcacctgcctgttttgccttttcctggcaagctttcttgcggaaatggcgcagaccgacatgggatattttattcctagccgagttctggtcggtttgggagcggtatgctttacgttgttcagtatcgttagtatattagaagcgggttctgctaaaaaataattgcaacgtaccggataaaaccagcgttgaccatttgcgtaacgctggtttttcttaggcatcatgaaataacgcagcattaatgcatagtggttaagtataaaaaacagcaaagttactgtttttttcaacctgttcatatttcataaagatctggccactgagtgagttttcaatcacctttccatccaccttatattaagcatggagggtttcagttcacgggctcattagaaaataatcacaagataaccactatcaaaattagctcatttttaatgcgactctaataattttcatctttaggaaataggtcaggagctctttgctgcaatcaaatcctgcgcacaagcccacgcactgctccacgcccactggaagttatagccccccagccagccggtgacgtccatcacttcgccgatgaagtacagcccaggcactttgcgcgcttccatcgtccgactagagagttcgttggtgtccacgccgccgagcgtcacttcggcagtgcgatagccttcagtgccgttgggttgtacgcgccagtcggtcaatgtgctaatcagtgcctgttggtcacgcacgttgagctgttttaggctaacatccgggatttgcccgagttgctgtaagcgttcaaccaaccgcttcggtagatgaaccgccagtgtgtttttcaggctttgattcggatgtgcgttacgctgctcattcaggaaggtttcgaggtccacatccggtagcagattgatgctgacaaattcccccggttgccagtagctactaatctgcaacaccgccggtccagacaagccgcggtgggtgaagagtaagttctcacggaaaacggtgccgttttcagcggtaatcacggaaggcaccgccacgcccgccagcacctgtaactcttcgagcaacggtttatgcagagtgaatggcaccagacccgcgcgggtcggcagcacgttgaggccaaattgttcggcaatcttataaccaaacgggctcgcgcccagccccggcatactcagcccaccagtcgcgatgaccagcttttcgcaaccgacagtcatgccgttcagatcaagcgtgaagcctgtttcatccttcgccacactcagcacttcgctacgcaatctgaaggtcacattgcccttctcgcactcatccaccagcatgtcgacaatctgctgcgcggagtcatcgcagaagagttgccctaacgttttctcgtgccaggcgatgccgtgtttattgaccagatcaatgaaatcccactgggtaaaacgtgcgagtgcagacttacaaaaatgcggattctggctcagataagcgcctggttcgacataaaggttggtaaagttgcagcgcccaccgccagacataaggattttgcgccctggttttttaccattatcgatcagcagaacccggcgtcctgcctgacctgccagcgcagaacagaacatacccgccgcaccagcgcctataataatggcatcaaacctttccacgttgcgctcctcttagaaaaaacgggcgtgaattgtaaagattcctcagtggtcgcaccagcatcaatattactaaaaggaagtatttgcctgaattatataagataattattttttgagtgaaatccatacagggggcaaatcaaaaaaagtctatatttcactttgcccgcgccgcgaaagtcactgataatgcgccgcgttcatgtcctcaaaatggcgtaacgtcctatgctacatttgtttgctggcctggatttgcataccgggctgttattattgcttgcactggcttttgtgctgttctacgaagccatcaatggtttccatgacacagccaacgccgtggcaaccgttatctatacccgcgcgatgcgttctcagctcgccgtggttatggcggcggtattcaactttttgggtgttttgctgggtggtctgagtgttgcctatgccattgtgcatatgctgccgacggatctgctgcttaatatgggaagctctcatggccttgccatggtgttctctatgttgctggcggcgattatctggaacctgggtacctggtactttggtttacctgcatccagctctcatacgctgattggcgcgatcatcgggattggtttaaccaatgcgttgatgaccgggacgagtgtggtggatgcactcaatatcccgaaagtattaagtattttcggttctctgatcgtttcccctattgtcggcctggtgtttgctggcggtctgattttcttgctgcgtcgctactggagcggcaccaagaaacgcgcccgtatccacctgaccccagcggagcgtgaaaagaaagacggcaagaaaaagccgccgttctggacgcgtattgcgctgatcctttccgctatcggcgtggcgtttagccacggcgcgaacgatggtcagaaaggcattggtctggttatgttggtattgattggcgtcgcgccagcaggcttcgtggtgaacatgaatgccactggctacgaaatcacccgtacccgtgatgccatcaacaacgtcgaagcttactttgagcagcatcctgcgctgctcaaacaggctaccggtgctgatcagttagtaccggctccggaagctggcgcaacgcaacctgcggagttccactgccatccgagcaataccattaacgcgctcaaccgcctgaaaggtatgttgaccaccgatgtggaaagctacgacaagctgagccttgatcaacgtagccagatgcgccgcattatgctgtgcgtttctgacactatcgacaaagtggtgaagatgcctggcgtgagtgctgacgatcagcgcctgttgaagaaactgaagtccgacatgcttagcaccatcgagtatgcaccggtgtggatcatcatggcggtcgcgctggcgttaggtatcggtacgatgattggctggcgccgtgtggcaacgactatcggtgagaaaatcggtaagaaaggcatgacctacgctcaggggatgtctgcccagatgacggcggcagtgtctatcggcctggcgagttataccgggatgccggtttccactactcacgtactctcctcttctgtcgcggggacgatggtggtagatggtggcggcttacagcgtaaaaccgtgaccagcattctgatggcctgggtgtttacccttccggctgcggtactgctttccggcgggctgtactggctctccttgcagttcctgtaatcgtacgcaccaaaacgagcgggtcagctggcccgcttcagattgtgacatagtgcgctttgttcatgccggatgcggcgtgaacgccttatccggcctacaaaaacatgcaaattcaatagattgcagagattatgtaggcctgataagcgtagcgcatcaggcaattttgcgtttgtaatcagtctcgagcgggtcagtttactggcccgctttttttatgcgttattattgctgaagtgcttaatgccaaatcatcaatgcaatcaggctgaccaccaccagaccacacaatgcgctggtcagaataaactgccgacgcacccgctcacagcggcgaataaattcatcatcgtgatgatcgcgataacgttgggcatagatataccaaacgagacgcacctgtttgttgggttggccatgattggtaaaaaagccccctccatcaacatattgatagagcaatggatcgcagttacgcagtaccactaacaacgcgcgtagactactgaaatagcgcgccatgttaacaatgcaaacgacacataaagcccaaaataatgcgacggtgcttatcatacctcctccccggcgacctgcccgcggagttccaccccggggctaccgctcccgatacgctgccaatcagttaacaccaggtcctggagaaaccgcttttgtggtgaccaacatacgagcggctctatagatagtgtaggagatcaggttgttttttttccagaaggttaaccactatcaatatattcatgtcgaaaatttgtttatctaacgagtaagcaaggcggattgacggatcatccgggtcgctgtaaggtaaggatggtcttaacactgaatctttacggctgggttagccccgcgcacgtagttcgcaggacgcgggtgacgtaacggcacaagaaacgctagctggccagtcatcgacaactttatggaaggagtaacactatggcttataaacacattctcatcgcggtcgacctctccccggaaagcaaagttctggtagagaaagcagtctctatggctcgcccctacaatgcgaaagtttctctgatccacgtagatgtaaactactctgacctatacaccgggcttattgatgtgaatctgggtgatatgcagaaacgcatctctgaagagacacatcatgcactgaccgagctttccactaatgcaggctacccaatcactgaaaccctgagcggcagcggcgacctgggccaggttctggtcgatgcaatcaagaaatacgatatggatttggtggtttgtggtcaccaccaggacttctggagcaaactgatgtcttccgcacgtcagctgatcaacaccgttcacgttgatatgctgattgttccgctgcgcgacgaagaagaataatcttccctctacgacgtgttcctgaacgcccgcatatgcgggcgttttgctttttggcgcgccttgttacctgatcagcgtaaacaccttatctggcctacggtctgcgtacgcaatcaaaatccccagccaatacaacatttaacaccatcatattttccatcattagtgtgatcatctggttattttctgttgtaatagtgtattaatctattcaccgcatcaatattaagaatctctgacagatgtaaactttttcgcgcgttatcccttacgcgttcatacttttcaggatggtattggaaggttaataaatatgaatacaacaacacccatggggatgctgcagcaacctcgcccatttttcatgatcttttttgtcgagttatgggagcgattcggctactacggcgtgcagggcgtactggcggttttcttcgttaaacagcttggattcagccaagagcaggcttttgtcacttttggtgcttttgctgcgctggtctatggcctcatttccattggcggctatgtcggcgaccacctgctggggaccaaacgcaccattgttcttggagcacttgtgctggcgattggctacttcatgaccggcatgagcctacttaagcctgacctgattttcatcgccctggggactatcgctgtcggtaacggcctgtttaaagctaacccagccagcttgcttagcaagtgctatccgccgaaagatccgcggcttgatggcgcattcaccctgttctatatgagcatcaacatcggcagcttgatagcgttaagcctggcccctgtgatcgctgatagattcggttatagtgtcacctacaacctgtgcggggcggggttaattatcgcattactggtttacatcgcctgtcgtggaatggtgaaagacattggttctgaacccgacttccggccaatgagcttcagcaaactgttgtacgtgttacttggcagcgtggtgatgatcttcgtatgcgcatggctgatgcacaacgtagaagtcgccaatctggtgctgattgttctctccatcgtcgtcaccatcatcttctttcgtcaggcattcaagctggataaaaccgggcgcaataaaatgtttgtcgcctttgtcctgatgctcgaagcggtggtgttttacattctctacgcccagatgccaacaagcctgaacttctttgccatcaacaacgtgcatcatgaaattctcggtttttccatcaacccggtcagcttccaggcgcttaacccgttctgggtggtactcgccagcccaatactggcaggcatttacacgcatctgggtaacaaaggcaaagacctcagcatgccgatgaaatttactctcggcatgtttatgtgcagtctgggctttttgacggcggcagctgcgggaatgtggtttgcggatgcacaagggctgacaagcccatggtttatcgtgctggtgtacttattccagagcttaggtgaactgtttattagcgcccttggcctggcgatgattgctgccctggtgccgcagcatttgatgggctttattctcgggatgtggttcctgacgcaggctgccgcgttcttgctgggcggctatgtggcaacatttaccgcggtgccggacaacattaccgatccgcttgagacgttgcccgtctataccaacgtgtttggtaagattggtctggtcacgctgggcgttgcagtagtgatgctgttgatggtgccgtggctgaaacgcatgattgcgacgccggaaagccattaattattcttgcagaaagcagggtagcgttatcgctaccctgttttagttttacactggcgtacctgcatagatatcaaagcgatgccctttagtgactaccgcgtttggcgtggcgacattcgccagcggtggcgcgtagtccgggcgctttaccaccacgcgtttggtcgccagcaagcgtgcaggctccagtaatccatcggcatcaagatccggtcccaccaggctctgaaagacacgcatctcttttttcactagcgcgcttttctgcttatgcgggaacatcgggtcgagataaaccacctgcgggcgcggggtaatatcagtcagcgccgtcaggctggaggcgtgaattaactgcaaccgctcctgcaaccagccgccgatttccgcatccgcataaccacgcgccaggccgtcgtcgagtagcgcggcaaccactggattacgctccagcatccgcacgcggcagccgacactagccagtacaaaggcatcgcgcccaagtcctgcagtggcatccaccacatccggcaaataatcgcctttaatgcccaccgctttcgccaccgcctcaccgcgaccaccgccgaatttgcgtcggtgcgccatcgctccgccaacaaaatcaacaaagatgccgccaagttttggctcatcacgcttgcgcaattccagatgttccggcgttaacaccagcgccatcaggttgtcttcatcgtgctccagcccccagcgggccgccagaacagataaggcaccgtctccggtgcctgtttcatcaattaagcagattttcactgaatgatcagcccttaatgccgtaatgctccagcatcgcatccagctgcggttcacgaccacggaagcgtttgaacagatccatcggctcttcactaccgccacggctcagaatgttgtcgaggaagctctgcccggtttcacggttgaaaatgccctcttcctcaaagcggctgaaagcatctgccgccagtacgtcagcccacaggtagctgtagtaacctgcggcataaccaccggcgaaaatatggctgaaagcgtgcgggaaacggccccaggacggagatggcaccacggcaaccagtttcttgatttctgccagagtttcgaggatttttgccccctgatccgggcggaactcggcatgaaggcggaaatcaaacaggccgaactccagctgacgcagaataaacagcgccgcctggtagttcttcgccgccagcattttatccagcaactctttcggcagcggttcgccggtttcatagtgaccagagataaacgccagcgcctccggctcccagcaccagttttccataaactgactcggcagttcgaccgcatcccacggcacaccgctgataccggaaacaccagcggtttcgatgcgggtcagcatatggtgcaggccgtgaccgaactcgtggaagagggtgatcacttcgtcgtgagtgaacagcgccggtttaccatttaccgggcggttgaagttacaagtcaaatacgcgaccggtttttgcaaagaaccatcagctttacgcatctggcctacgcagtcatccatccacgccccgccgcgcttgttttcacgggcatacagatcgaggtagaagctaccgcgcagttcgttattttcgtcatacagttcgaagaaacgtacatccggatgccagacatcaacatctttacgctctttagcggtgatgccgtaaatacgcttaaccacttcaaacaggccgttaaccgctttgttttccgggaagtacggacgcagctgttcgtcactgatgctgtagaggtgctgtttttgtttttcgctgtagtaagcgatatcccacggctgcaactcatcgacgccaaattcggctttggcaaaggcacgcaattgcgccagctctttttcgccttgtggacgcgcgcgttttgccagatcggttaagaaatccagcacctgctgcgggttttctgccattttagtggcaagggatttaaaggcgtagttttcaaagcccagcagttgcgccagttcgtgacgcagcgcgaggatctcttccatcaccttgctgttatcccatttaccggcgtttgggccttgatcggaggcgcgggtgctgtaagcgcgatacatctcttcacgcagagcctggttgtcgcagtaggtcattaccggcaagtagcttgggatatccagcgtcagcaaataaccttccagctctttcgcttcggcctgggcttttgccgcagccagcgcgctttctggcatccccgccagctccgcttcgtcggtaacgagtttggtccagcccattgtcgcatcgaggacgttgttgctgtactggttgcccagttcagaaagacgggtcgcaatttcgccgtaacgctgctgtttctctttcggcagacctatgccagagagttcaaagtcgcgcagtgcgttatcaaccgctttcttctgcgccgtgttcagcgtggcgtaatgatcgccatcgcgcaggtcgcgatacgctttatacagcccttcatgttgccctacccaggtgctgtattcgctcagcagcggcagggtttgttcgtaggcttcacgcagttccgggctatttttcacgctgttcaggtggctgaccggggagaagatacgccccaacacatcgtccacttccgccagcggctggcagagattttcccaggtgtacggtgccccttgcgctactacgcgctccacgttttcgcggcagtcgttcaatgccttagtcacggctggaacgacatgttccgggagaattttagaaaacggaggcaattcaaagggagtcagtaacggattcgtcattcgcgcagtcctggttaaagaggttaaggaagcgctcaacaggcgctttacataatgtgtgtagcatggggttaagtgtagtgaatttcaatgagaaacgttacgctttcgcggcggcggcctcttttcggtatactgtcctgatacgcttttgtgcgccccgaatacgggccgatttttacttaccggaacacctttacccatgctcagttatcgccacagctttcacgctggcaaccacgccgacgtccttaaacataccgttcagagcctgatcatcgagagcctgaaagagaaagataaaccgtttctctatctcgacacccacgcaggggccgggcgttatcagttaggcagcgaacatgccgagcgtaccggcgaatatctcgaaggcatcgcccgtatctggcagcaggacgatttgcccgcagaactggaggcgtacatcaatgtggtaaaacacttcaaccgtagcggtcagttgcgttactaccccggtagcccgttgattgctcgcctgctactgcgtgaacaggacagcctgcaactgaccgaactgcacccgagcgattacccgttgttgcgttctgaatttcagaaagatagccgtgcgcgtgtcgaaaaagccgacggtttccagcagcttaaggccaaactgccgccggtttcccgccgtggtttaatccttatcgacccgccgtatgaaatgaaaactgactatcaagcggtggtcagcgggatagcagaaggttacaaacgtttcgccactggtatttacgcactgtggtatccggtggtgctgcgtcagcaaattaagcgcatgatccacgatctggaagcgaccggtattcgcaaaattctgcaaattgaactggcggtactgccagacagcgatcgccgtggcatgaccgcttccggcatgattgtgattaacccgccgtggaaactggaacaacagatgaataacgtgctgccgtggctgcacagcaaactggttccggcaggcaccgggcacgccaccgtaagctggatcgtgccggagtaattgcagccattgctggcacctattacgtctcgcgctacaatcgcggtaatcaacgataaggacactttgtcatgactaaacactatgattacatcgccatcggcggcggcagcggcggtatcgcctccatcaaccgcgcggctatgtacggccagaaatgtgcgctgattgaagccaaagagctgggcggcacctgcgtaaatgttggctgtgtgccgaaaaaagtgatgtggcacgcggcgcaaatccgtgaagcgatccatatgtacggcccggattatggttttgataccactatcaataaattcaactgggaaacgttgatcgccagccgtaccgcctatatcgaccgtattcatacttcctatgaaaacgtgctcggtaaaaataacgttgatgtaatcaaaggctttgcccgcttcgttgatgccaaaacgctggaggtaaacggcgaaaccatcacggccgatcatattctgatcgccacaggcggtcgtccgagccacccggatattccgggcgtggaatacggtattgattctgatggcttcttcgcccttcctgctttgccagagcgcgtggcggttgttggcgcgggttacatcgccgttgagctggcgggcgtgattaacggcctcggcgcgaaaacgcatctgtttgtgcgtaaacatgcgccgctgcgcagcttcgacccgatgatttccgaaacgctggtcgaagtgatgaacgccgaaggcccgcagctgcacaccaacgccatcccgaaagcggtagtgaaaaataccgatggtagcctgacgctggagctggaagatggtcgcagtgaaacggtggattgcctgatttgggcgattggtcgcgagcctgccaatgacaacatcaacctggaagccgctggcgttaaaactaacgaaaaaggctatatcgtcgtcgataaatatcaaaacaccaatattgaaggtatttacgcggtgggcgataacacgggtgcagtggagctgacaccggtggcagttgcagcgggtcgccgtctctctgaacgcctgtttaataacaagccggatgagcatctggattacagcaacattccgaccgtggtcttcagccatccgccgattggtactgttggtttaacggaaccgcaggcgcgcgagcagtatggcgacgatcaggtgaaagtgtataaatcctctttcaccgcgatgtataccgccgtcaccactcaccgccagccgtgccgcatgaagctggtgtgcgttggaagcgaagagaagattgtcggtattcacggcattggctttggtatggacgaaatgttgcagggcttcgcggtggcgctgaagatgggggcaaccaaaaaagacttcgacaataccgtcgccattcacccaacggcggcagaagagttcgtgacaatgcgttaaatgttaaagggctaagagtagtgtgctcttagcccttaattacgtttccgctatcagttcagaagctgaagcagaaagcggatcagttccagcagcgcaattaacgcccctagaacgatgattgctttatcaatcacccgttttctccatgcgatggagtgagaatgcatccgcttactcatccactgcctgtcacggcgcatgtctcattgttagataagaactctctcactccggccagagcatcagttaacggcaccacccgtacttctgaccaggactttgaaagcgtttatgcgcattgccagagtgaaaatgcctcagagctaactggataatcatacagtacatgcaggttataaaaccagcacgtccttgcaatagtttcagtatggtattagcattgatgcgttagatgatggctatctcactccagtcagagccaccaactcagggctggaaagtaaaaaaccgacgcaaagtcggtttttttacatccggattcggacaaggcttaatatgacgatgacccagtgaaagtatataaatcgtcactgcgatatataccgaagtgctccctccgccagctgaagaaatcgctaattcttgcaatgttagccactggctaatagtattgagctgttagataagaactctctcactccagccagagccaccaactcagggctggaaagtaaaaaaccgacgcaaagtcggtttttttacgtcctgattcagacctcctttcaaatgaatagccaactcaaaattcacacctattaccttcctctgcacttacacattcgttaagtcatatatgtttttgacttatccgcttcgaagagagacactacctgcaacaatcaggagcgcaatatgagttttctgttacccatccaattgttcaaaattcttgctgatgaaacccgtctgggcatcgttttactgctcagcgaactgggagagttatgcgtctgcgatctctgcactgctctcgaccagagccagcccaagatctcccgccacctggcattgctgcgtgaaagcgggctattgctggaccgcaagcaaggtaagtgggttcattaccgcttaagtccgcatattccagcatgggcggcgaaaattattgatgaggcctggcgatgtgaacaggaaaaggttcaggcgattgtccgcaacctggctcgacaaaactgttccggggacagtaagaacatttgcagttaaaaatttagctaaacacatatgaattttcagatgtgttttatccgggaggcattatgttactggcaggcgctatctttgtcctgaccatcgtattggttatctggcagccgaaaggtttaggcatcggctggagtgcaacgctcggcgcagtactggcgttagttacgggcgtggtccatccgggtgatattccggtggtgtggaatatcgtctggaacgcgacggctgcgtttatcgccgtcattatcatcagcctgctgctggatgagtccggcttttttgaatgggcggcgctgcacgtcagtcgctggggtaatggtcgtggtcgcttgctgtttacctggattgtcctgctcggtgctgccgttgccgccctgtttgccaatgatggcgcggcgcttattttgacaccgattgtcatcgccatgctgctggctttagggttcagtaaaggcactacgctggcgttcgtgatggcggccggattcattgccgataccgccagcctgccgcttattgtctccaacctggtgaatatcgtttccgctgatttctttggcctcggctttcgcgaatacgccagcgtgatggtgccggtggatatcgccgcgattgttgccacgctggtgatgttacatctctattttcgcaaagatattccgcagaactacgatatggcgctgctgaaatctcccgcagaagcgatcaaagatcctgctacgttcaaaactggctgggttgttttactgcttctgctggtgggatttttcgtcctggaaccgctcggcattccggtgagcgccattgcagctgtgggcgcgctgatattatttgtcgtcgctaaacgcggtcatgcgattaatacgggtaaagtcctgcgcggtgccccctggcagattgtcatcttcagcctcggcatgtatctggtggtttatggcctgcgcaatgccggattaacggaatatctttctggcgtactcaacgtgctggcggataacggcctgtgggccgcgacgctcggcaccggattcctcaccgccttcctctcttctattatgaacaatatgccgacggtactggttggcgcgttgtccattgatggcagcacggcatctggcgttatcaaagaagcgatggtttatgccaatgtgattggctgcgatttgggaccgaaaattaccccaattggtagcctggctacgctactctggctgcacgtacttagccagaagaatatgactatcagctggggatattacttccgtacagggattatcatgaccctgcctgtgctgtttgtgacgctggctgcgctggcgctacgtctctctttcactttgtaatgagatactgatatgagcaacattaccatttatcacaacccggcctgcggcacgagccgtaatacgctggagatgatccgcaacagcggcacagaaccgactattatccattatctggaaactccgccaacgcgcgatgaactggtcaaactcattgccgatatggggatttccgtacgcgcgctgctgcgtaaaaacgtcgaaccgtatgaggagctgggccttgcggaagataaatttactgacgatcggttaatcgactttatgcttcagcacccgattctgattaatcgcccgattgtggtgacgccgctgggaactcgcctgtgccgccctagtgaagtggtgctggaaattctgccagatgcgcaaaaaggcgcattctccaaggaagatggcgagaaagtggttgatgaagcgggtaagcgcctgaaataaagcggcgatatcccccccacaggttgttagaaaagtgcgctttatttatgtcggatgcgacgctggcgcgtcttatccgacctacaaagttatgaaaattcgatgaatagtatgttatttgtaggcctgacaggcgtagcgcatcaggcgattttgctatttacacagtactccctgcgtgagattccaattatcgcgtccagcatggtgtatcagtgagctgcttagttatcagcgatacagcgcagtagtttaaagacgtactggattatgatttatcagtggtttacacaacaaattattaaataattataagataccttaacccattttattattacacatctaaaacatcacaaaaaaaaatcacttcacacactatcagagaacataataactttttaaaatgagcgcattttgatagttgttaacgatttcctttacgatactatcactaccctttttttacacacaaatattaccgggtggagataaaagggaaatcaaaggtaattatatcaggaagatataacgcattacatttattgtgtgtagaagaaaatccattcctgttctaattatccaatttaaacatcttagcataaaacaaatgatgaataaggaattttatattgattattagcactttataatcattgaataaaaatagattttatgtacttttaaaacaatgcactatattatggggtgatggatattcatgtcacgccccaaaattaactgagttcacctaaacagaaaggatataaacatcagacaggtttacgttactatcaggcatatcacctcagaatcagatgaaaactataaagaaatatctattatggttttaatatttgttgataaggatagtaacatgaacatgacaaaaggtgcactcatcctcagccttagttttttgcttgccgcatgtagtagtattccgcaaaatatcaaaggcaataaccaacctgatattcaaaaaagttttgttgctgttcataaccagccggggttatatgttggtcaacaagcgcgctttggtgggaaggttatcaacgttatcaatggcaaaacggatacgttgttagaaatctctgtattaccgttggatagctatgcgaagcctgatattgaagccaactatcagggccgactgctcgccagacaaagcggcttccttgatccagtgaactatcgtaatcactttgttaccatcctcggcaccattcagggtgaacaacctggctttatcaataaagtcccgtataacttcctggaagtgaatatgcagggcatccaggtgtggcatttgagagaagtggttaataccacctataacctgtgggattacggctatggtgcattctggccggaaccgggctggggtgcgccttactacaccaatgcggtgagtcaggtaacacctgagctggtcaaataacaccaccgaaagatgcagatgctttctcagcatctgcatcatgcattacatcaaattaatacacagtaagctaactattattattataagccctgtcctgttaattacctttggcaaactgattataaagttaatgtccgcaccaggagtcggttatgtttcttataattaccagggatacgatgttcttcaccgcgatgaaaaacattctgagtaaaggtaatgtcgttcatatacagaacgaagaagagatcgacgtaatgttgcatcagaatgccttcgtcattattgatacattaatgaataatgtatttcattctaattttctcactcaaattgaacgattaaaacctgtccatgtcattattttctccccctttaatattaaacgctgcctggggaaagtgccggtgacctttgttccgcggactatcactatcattgattttgtcgcactcatcaatggcagttactgctctgtgcctgaagcggctgtgagtcttagccgcaagcaacatcaggttctgagctgcattgcgaatcaaatgacaacggaagatattctggagaaactgaaaataagcctaaaaacgttctactgccataaacacaatatcatgatgatcctcaatcttaagcggatcaatgagctggtacgccatcagcatattgattatctggtgtgaatttcaggcttacggtgagtctggctacgctgccacacagattagctaatactaacgcctttcacccctgccataccttttaataatcgcaacaggtcttctatgctcgttgtggcatgaagctggatatcaatggcgaccacttcatgatcttcattttcctgcaagctaactaaatcagtttttattttttgctgcttaaaccagtcgagcatacttaccgtattaccgttcactaatgtcagctgtaaatggtaatttttgttcatcaggcggaaggttaattgatggaagacttccagcaccaacaaggtcatcacactaccataaatacccagttcgtacataccgctgccaataaccatacctatggcggcggtcacccagatatccgctgccgtcgtcagacctacaatattttggttacgaacgagaatgttacctgcaccgataaacccgacgcccgtcaccacctgagcagcaatacggctggggtcgagtccgacgtgatctaaagacagcacgtcagcaaaaccatatttgctaacaatcataaacagggcgcttcccatgccaattaatacatgtgtgcgtaaccctgctcctttgccgcgcatttgcctttccatgccaatagcgccacaggcaattgccgcgagtataagacgtataataaattctgctgtcatataaaaatgcaaaaaggagcagcaagatggctcaacttgctactcttttttacttgcacctcattaattcggcaagtcattagatgcttgatttttgaaggtatacaaatttttctgcgggtttttcttacagtattcgatcactttaggaatttgagtgagatcggtttcatttaaagtaacggtatcgccacctttatatactgtttcttcatgcagcatccaccatgcaaccggggtcattgcttttggattcagatcaataaattcctggcaggtcatatctttagcggattcattggctgccaacgcagattgtgcgttcaccagactcaaagccgctacagcgcccataaaaataaacgctttacggagagaactaatattcattttgtaacccattcaatatagagattatatatgaacaggaggaatagctgcttttaaagaagatattccggcctgttcaatatgcaaggaagtacgatgtaacgcattcccggaattacatatctttcttaattttgtcccattcgcctttaactttatctttaaagttggcttgtttatcctgagtacaagcctgaacgatagctggggttacggttgcaataccctgaacatctaaaaccgcatcttctggtttatctttgttgttcagcgcttcagcaaaaccaactgcagttggctggaaggattcgtccacagccaggaaatcttcacaggtccaggagttgaccggttttttgttatcagctgctttttgcgcatccgctgcattgctcacaactggcagaagaagcagaccaccaagaataacgcctaatacttttttcatcgtaatatcctcaactataaagtgaaagagccgtcacgaatcaatttcgacactgaggttataacctggttttctgtatatgtcatgttgatggaaaatatcaaaatcagatatttttatttcaatacaatgagttacagatgcatcagatactgcaattaggaaatttttattaaatcgactgcattcttagacgcgtttttggcatagattgatagcaggggattttcttcttaattttatagggtggttctatgttatatatagataaggcaacaattttgaagtttgatctggagatgcttaaaaaacatcgcagagcaatccagtttattgccgtgctgctgtttatcgtcgggttgctgtgtatcagtttcccgttcgtctctggcgatattttaagcacagtagtgggtgcattattaatctgcagcggtattgcgcttattgtcgggttattcagcaaccgcagtcataatttctggccggtattatccggtttcctcgtcgcagtcgcctatttattgatcggctatttcttcatccgcgcaccggagctgggcatttttgccattgcggcatttattgccggtttgttctgtgttgcaggggttattcgcctgatgagttggtatcgtcagcgtagtatgaaaggcagctggctacagctcgttattggtgtgctggatatcgtcattgcctggatattccttggtgcaacgccgatggtgtctgtaacgctggtttccacactggtgggaattgaactgatatttagcgccgccagcctgttcagcttcgccagtttgttcgttaagcagcaataattaccccggttgtcacccggatcatagtcacttgatgtgactatgatccgattaatactctctccgctacgcagtgttgtagatcaattgcgcactatcattgaaataattacctgctagtgattatttcaacctactgaatttcatctaatttttttcactctatggcaaattagccatttcaaacattatcatggctgatattttccgtagtcaggtttaatgttttaaaagtgctgtgggaaagtgaacaaagagttccgtaagcgttgatgctatgggcggttaaataagtaatccgggttcatttttttgcaactggcgttgattacattgcataaatatccgtgtctccagacgctatataaaaacctgaagacatgaatgcgttatttactcaggtaatttcaatgcgttaaaagaaagctggcaatccaattgccagcttaagtcgaaacaaggagactcgatatttaaatcggattacattttaactttagtaatattcttcagagatcacaaactggttattgataacttattcttgggcagtaatccgcaaacgttaactttttgtttgctatttacaagctgataacaaccaggaatcttacttaggatcaatatatggagtgcgtgatggataaatctgaagtattgattagtgttaatagacgtattagttcacgaagggtaaagttcttataggcgtttactatattgaacaacgattcggacaaggatgtaaataatgaaaaggatgacatattcgaaacgataacggctaaggagcaagttatgatttttctcatgacgaaagattcttttcttttacagggcttttggcagttgaaagataatcacgaaatgataaaaatcaattccctgagtgagatcaaaaaagtaggcaataaacccttcaaggttatcattgatacctatcacaatcatatccttgatgaagaagcgattaaatttctggagaaattagatgccgagagaattattgttttggcaccttatcacatcagtaaactaaaagctaaagcgcctatttattttgttagccgcaaagaaagtatcaaaaatcttcttgagattacttatggtaaacacttgccccataagaatagtcaattatgttttagtcataatcagttcaaaattatgcaactgattctgaaaaataaaaatgaaagcaatatcacgagcacgctcaatattagccaacaaacattaaagattcagaaattcaacattatgtacaagctgaaactaagacgtatgagcgacatcgtcaccctgggtatcacatcttatttttaatcaggacataagcaactgaaattgatggctggcatgacgagggatgcagatgctgatttcattacccccggtgattactaaaggagaggctaaaacgactttattcccctggtatgtgtatccaccagtagaacccttcgttgcccgaatgctggcaggaactgttggcagaacggcaacattttttttgtcgttgacctcaccatgtcgatcactgtgcctgtatcccaccttactggctgacaaccccactatgccgctggtctgtaaatccctcatatctctcctcgcgcgcaatttaaagaaccgttatttctcaagaattttcagggactaaaatgaacagaagaagaaagctgttaataccgttgttattctgcggcgcgatgctcaccgcctgcgatgacaaaagcgcggaaaacgccgccgccatgacgcctgaggtcggtgtcgtcacactctcccccggtagcgtcaatgtgttgagcgaattgcccggtagaaccgttccttatgaagttgccgagatacgtccccaggtgggcggtattatcattaaacgcaactttatcgaaggcgataaagtgaaccagggcgatagcctgtatcagattgatcctgcacctttacaggccgagctaaactccgccaaaggcagcctggcgaaagcgctctctaccgccagcaatgcccgcatcacctttaaccgccaggcaagcttgctgaagaccaactacgttagccgtcaggattacgacaccgcgcgcacccagttgaatgaagcagaagccaatgtcaccgtcgccaaagcggctgttgaacaggcgacgatcaatctgcaatacgcgaatgtcaccagcccgattacgggcgtcagcgggaaaagcagcgtgaccgtcggcgcactcgttaccgctaatcaggcagatagcctggttaccgtacaacgtctggacccgatttatgtcgatctcacgcagagcgtgcaagatttcttacgcatgaaagaagaggtcgccagtgggcaaatcaaacaggttcagggcagtacgccagtacagctcaatctggaaaatggtaaacgctacagccagaccggcacgctgaaattctccgacccgacagtggatgaaaccacgggctccgtgacgttacgggcgattttccccaacccaaatggtgacttgctgcctggcatgtacgtcacggcattagtggatgaaggtagccgccagaatgtattactggtgccgcaggaaggcgtcacccacaacgcccagggtaaagcaacggcgctcattctggataaagacgatgtcgtgcagctacgcgaaattgaagccagcaaagccatcggcgaccagtgggtcgtcacctctggcttgcaggctggcgatcgggtgatcgtttccggtttgcaacgcattcgtccgggtatcaaagcacgagcaatttcctccagccaggaaaacgccagcaccgaaagcaaacaataacgttgcaggcttaaggggactttcatggctaactattttattgatcgcccggtttttgcctgggtacttgccattattatgatgcttgcaggtggtctggcgatcatgaacttaccggttgcgcagtatccgcagattgcgccaccgaccattaccgtcagcgctacctatccaggtgccgatgcgcaaacggtagaagacagcgtcactcaggtgattgagcaaaatatgaatgggcttgatggcctgatgtacatgtctagtaccagtgatgcggcgggcaatgcctctatcactctgaccttcgagactgggacatctcctgatatcgcacaggttcaagtgcaaaataaactgcaactcgctatgcctagtttacctgaagcagtgcagcagcaggggattagcgtcgataagagcagcagtaatatcctgatggtagcggcgtttatttctgataacggcagcctcaaccagtacgatatcgcggactatgtagcgtctaatatcaaagacccgctaagccgtaccgcgggcgttggtagcgtacaactctttggttccgagtatgccatgcgtatctggctggacccgcaaaaactcaataaatataacctggtaccttccgatgttatttcccagattaaggtgcaaaacaaccagatttccggtggtcaactgggtggcatgccacaggcggcagaccagcagctaaacgccagcatcattgtgcagacgcgtctgcaaacgccggaagaatttggcaaaatcctgttgaaagttcagcaagatggtagccaagtgctgctgcgtgatgtcgctcgcgtcgaacttggggcggaagattattccaccgtggcacgctataacggcaaacctgctgccgggatcgccatcaaactggctgccggagcaaacgccctggataccagccgggcagtcaaagaggaactgaaccgcttaagtgcctatttcccggcaagtctgaagacggtttatccttacgacaccacgccgtttatcgaaatttctattcaggaagttttcaaaacactggttgaggctatcatcctagtcttcctggtcatgtatctgtttttgcagaatttccgtgccacaatcatcccgacgattgccgtaccggtggttattctcgggacgtttgcgatcttgagcgcggtcggtttcaccatcaacacgttgactatgttcgggatggtgctggcgatagggttactggtggatgacgccatcgtggtggtggagaacgtcgagcgtgtcattgcggaagataagctaccgccgaaggaagcgacgcataaaagcatggggcagatccaacgtgcgctggtcggtattgccgttgttctttccgcagtgtttatgccgatggcctttatgagcggtgcaaccggggagatctaccgccagttctccatcacgctgatctcctccatgctgcttagtgtatttgtggcaatgagcctgacccctgccctgtgcgccaccattctgaaagccgcgccggaaggcggtcacaaacctaacgccctgttcgcacgcttcaacacgctgtttgaaaaaagtactcaacactataccgatagcacccgcagcctgttgcgttgtaccggtcgctacatggtggtctacctgctgatttgcgccgggatggcggtgctgttcctgcgcacgccgacctctttcttaccagaagaggatcagggggtatttatgaccaccgcgcagttaccttccggtgccaccatggttaacaccacgaaagtgctgcaacaggtgacggattattatctgactaaagagaaagataatgtccagagcgtgtttaccgttggcggctttggcttcagcggtcaggggcaaaacaacggcctggcgtttatcagtctcaagccgtggtctgaacgtgtcggtgaggaaaacagcgttaccgcgatcattcagcgggcaatgattgcgttaagcagtatcaataaagccgtcgtcttcccgttcaacttacccgcggtggctgaactgggtaccgcgagtggttttgatatggaactgctggacaacggtaacctggggcacgaaaaactaacccaggcgcgaaacgagctgttaagtctggcagcgcaaagtccgaatcaggtcaccggggtacgcccgaacggcctggaagatacgccgatgttcaaagtgaacgtcaacgctgcgaaagctgaagcgatgggcgtggcgctgtctgatatcaaccagacaatttccaccgccttcggcagcagctacgtgaacgacttcctcaaccaggggcgggtgaaaaaagtgtatgtccaggcaggcacgccgttccgtatgttgccggataacatcaaccaatggtatgtacgcaacgcctctggcacgatggcaccgctttctgcctacagctctaccgaatggacctatggtagtccgcgactggaacgctacaacggcatcccgagtatggagattttaggtgaagcggcggccgggaaaagtaccggtgacgccatgaaatttatggcagacctggtcgctaaacttccggcaggcgtcggctacagttggaccggactaagctatcaggaagcgttatccagtaatcaggctcctgcgctgtatgcgattagtctggtcgtggtgttcctcgccctcgccgcactctatgagagctggagtattccgttcagcgtgatgttggttgttccgttaggcgtcgttggcgcattactggccaccgatctgcgcggcttaagtaatgacgtctacttccaggttggtttgctgaccaccatcgggctttccgccaaaaacgccatcctgattgtcgaatttgccgttgagatgatgcagaaagaagggaaaacgccgatagaggcaatcatcgaagcggcgcggatgcgtttacgcccaatcctgatgacctctctggcctttattctcggcgtgctgccgctggttatcagtcatggtgccggttctggcgcgcaaaacgcggtaggtaccggcgtgatgggcgggatgtttgccgcaacagtgctggcaatttacttcgttccggtctttttcgttgtagtggaacatctctttgcccgctttaaaaaagcgtaacgtgtaaatgagagtaaggttgaacatgaaggttcagccttactctttcctgctaaccattcaccactcaacaaccagctaaccgtcaggaataccaggcttagtacacagcactgaaagtagaaaccactccagccattcgtcatcaatttgaacaacacaatactgacccacattcccgtaatcgtatgaattgtcagcttaataatcccaaacatgccgagtcttttcctcctgaaaataccgataccgcctggcaaactgcgaaagagaactagccggtagcccggcagaaatcatcagggaagagtttcacatgaagcaggtgtgagatcctgaccaatattcaaatgcgaaatatgtcaggaaaaggtacctgggctatgttgcgcaaactgatgtggcgttacaccataatattgtcgaaatgtgtttataaagtagcttgtactgctatagccacatttttccgcaatagtatgcagaggaatttgacgtaactcgagtaatcgtctggccatgctcatcctggaggcgagtaatattttactgaaacaggtattttcatcctgcaacttttttttgattagactctcgctggtatacattctttccgcgatatcgcgcagataccaacgtttggcgatatcaaagctaataaggcgttcaacttttccactaacagtgctgatgctattgaaaagtaaggggatcagttctttcttatgagaaaacatgcttaaacaggaaaggtagagcatattgctcagtatcggactatttaccccggattcattgaagctatcaaaaatcgccgtcaccagcggcatggggggactctggttaattaacaaacggtctttgctgtgtaaccctaaattgcgtggtagctgacgaatattttgtaagtaatggcaaactgtcagctcatcgatatccagtcgtcgcgtatccggactacaaaacgcaaaatcgtctgccaaatttttctccagcagcagaatactctcgttatgcaggcttattttttgctgttcatgataaatatcgaaactacgacgaatgaggatcacgctgcagacatgagtcatgattatcccttatatttcatactgcgattatttcaatttcagtatactaatgaaatgatgccagactgtttcttagcgcaaaaactgccagatttggtaggaccaaaatttatccacaaagtagttttgcataacagttaattgataataagtaaatgcagcacgaatatattttcgcacagcgtatagcttatgtttataaaaaaatggctgatcttatttccagtaaaagttatatttaacttactgagagcacaaagtttcccgtgccaacagggagtgttataacggtttattagtctggagacggcagactatcctcttcccggtcccctatgccgggttttttttatgtctgagtaaaactttataatcttattccttccgcagaacggtcagtgccgtaaaaattcccttgcgcaacaatacttgccgcgctgtcacggttgctcaatctctgcgcgcttcgctcctgatactctgtgggcgtcatcccataataatttcgaaagacgtaaatgaaatagctcacgctgtgatatccacaggatactgcaactcgcttaatactaaaaccatgtataacaataagttgcaaagcacgttgcattctacactcagtaagcaactgactataacttgtctcttcttcgcgcaattttttctttaacagacttggactcatcaacagctcgctggcgattcgggctagtgtccactcatgggcgatattattattgataaccgtacaaactcgtgttcgcatgttcggttgtaaaacgttcagaagcagcggtataaagtgctcatcctcaagaaaaacagataacaacgcaaagattaatgctcttttacgtagcatttctgcatagcgaagattcttattctggcttagttgcgcaacttcctgaaaaacaggaatatctctactacagtgatgaacgagtaaactagaaacttttttatgtgcatgaagatttaatgcctcctccttgagcatcgggagaaataaactaagcgtgtccctactcacgaatacaaaattttcaacacacttatctactcgaatttggcttgcatccgcaaaaaccaggtcaccgccattaaaatagcgatattcaccattaaccatggtgagaatatatttatgtcttgcatacgcaattagacaattcccatgtagactttgcatagttgacttaatattacataaacatattactgtttattaatgtagcacgccgccctcttaagtcaaattgattgataaataaatttaaacgaagcgggagaacaggatgataatgtgtgatgttctacgggcaggatgactggatttataatacaaaaacgtgtttaagaacacagggaaattaatagtaagcaaataatcccttttcgtgacattaaaggtaatcgctacatttaataaacattcatataacatatatcttatcaacacgatgaatagacagccaatatattattgcgattaataagcaaccgaatgcccagctgtttttttaaaggctgggcattcggtttttacaacgttatgttatcaggtgtgtttaaagctgttctgctgggcaataccctgcagtttcgggtgatcgctgagatatttcagggaggctttgtagtcttccagcaacagttcagcaaagtccatttcgaagccgcgacgacacataatgcgcatcaccacgatgtcggtggcttcaccgccgagagtgaaggccggaacctgccagccgcgcagacgcagacgttcagagaggtcgtacagggtgtatcccggatcttcaccatctttcagtttgaagcaaaccgccgggatgccttcgtccgggcgacccgtacagatgaactcatacggccccagtttggcgatttcatccgccagataagcggcaacctggtaagaggcgttctgtactttggtatagccttcacgaccgaggcgcaggaattcatagtactgtgcaattacctgacccgccgggcgggagaagttgatggcaaaagtaccaatttgaccacccaggtagtcaacgttgaacaccagttcctgcggcagcgcttcttcgtcacgccagataacccagccgcagcccagcggagccagaccgaatttatggccactagcactgatgcttttcacacgcggcaggcggaagtcccagacgatatccggggcgacgaacggtgccaggaagccaccgctggcagcgtcgatgtgcatgtcgatgtcgataccggtgtcggcctggaatttatccagcgcatcgtgcagcggttgtgggaactcatagttaccggtgtaggtcacgccgaaagtcggcaccacgccgatggtgttttcgtcacaggcttcaatcatgcgtttcgggtccataaacaactgaccggggcgcatagggatctcacgcagctccacatcccagtagcgggcgaatttatgccagcagatttgtaccggaccgcacaccaggtttggtttatccgttggtttgcctgcagcttccatacgcttgcgccaacgccatttcatcgccatcccgccgagcatacaggcctcggaagaaccaatggtgttggtgccaacggcctgaccatttttcggcgcaggcgcatgccacagatcggcaaccatatttacgcaacgcaggtcgatggctgcggattgcggatattcttctttgtcgatccagtttttattgatgctcaaatccatcaatttatggacgttttcgtcgtcccaggtctggcagaaagtggccaggttctgacgagcgttgccatcaagatataattcatcattgataatctgaaatgcgacatcatcgcgcatttcgtgcagcggaaatcgtttactctccgcgatagtagaaatggcctttgcgccaaaacgactatcgagtagttcactgcggaaatccgttaacagcttctggtccatttcgaactccttaaatttatttgaaggcaataaaaaagtaggatttatccgcaatggaagcaaggcattacaggcttaatttaaataacaaaatcctaagcagaaaaacgactttttataatataaacatttaacatgataatattaaaaacagactttattatcgtaataaaaatcgcccaaacattgctgttcgggcgatcaaattaattattgtttatcctgcatatacggcgtgtacaccccgttcagactgtgcaggaaagctacgatatcatccacatcctcctgcggcagctctttgcctacctgatagcgcagcatcagtttcaccgccccgtccagcgtcggcacgtcaccgcgatggaagtacggtgccgttaaagcaacgttacgtaaaccgggtactttctgacgcaatttatcacgctcttctttagtcacattcatacgaccaatatccgccgccgtaatttccccaaagttaaagtcttttttcagccccaacggttcaaaggaacgtccgccgagaataataccaccatgacaagttgcacatttattatctttaaataattgatagccttttttctgttgcgccgtcagcgcattttcatctccgcgcaaccatttatcaaatggggaatccggcgtaattaatgttttctcaaattcagcaatggcatcagtaatattttcgccactgaaaccttgcggatagacttcgaggaactgcgttttaagctgcggatctttttccagcttagcaataatttcgtcccaggatttgctcgccatttcaatcgggttcaacggcggtccaccagcctgatcctgcaatgttgccgcacgaccatcccagaactgctcaacgttaaatacactgttaaataccgtcggcgcgttaatcggcccaactgcgccaccaacaccaatgcttgtttttctgccatcgacgccccccgcattcaacgcatggcaatgagcgcaactaatggtgctatcagcgcttaaacggggatcgtgatacagcgcaaaacccaacgccactttttgcgcatcggtaggcagtttttgcgggatgggctgcaccggttcattgcgatgttccggagcagtatcattgctggcgtaatattccgcgcgctgttttgcaatccaggccagtatttccgcccgctcttcatcactcaccttacccgcccagtgtagcgcggtataacgcgttggtggcatagtttcatactgcatcacccattcaatcttattcaaatcgctttggctaacgggtttatcagccagcagtgccgcacgcacggcctcaaggttaaaagatttatatccaagcttaatgtcgtaatccatcaactgtttcgcgccaggaatataataataggcgggtaattctgcgctaggcgtgtggcaatagtcgcatcctttttcgcggagaaagcctaaaaccttattattttcactgacagcagatgcctgaacatcggcctgtttactgcgtttattatcgtggtaccacacataaccagataaccctaaatagcaaatcgcgacgccagccaggccgatcgcggtaatacgactgaccattttcattattcttccctcacggtggtgagttattgtgacccagaaaattttccagaatgctgcaaacgtctctgcgagacaaagccatcataaaaaacagggagatacgctttttgataggaatcaatcaattacatgaatataaactatcaataagatagcctgtgcctattacccagatcaggaatggcatatcatgattgcggcgagagcaggattgaatgttctgaaaatgaaaaacaacaccaaatcggtatttttataaattccattgatattagtgcgttatattttttgacaggttaataaacgtgatccaccgcacgctttgtcgcccaccaggcggagcgaatgactacccttaaagaaaagccgataattagcgacgaatttcggaggttggatccttatgctcaatcagaaaattcaaaaccctaatccagacgaactgatgatcgaagtcgatctctgctatgagctggacccgtatgaattaaaactggatgagatgatcgaggcagaaccggaacccgagatgattgaagggctgcctgcctctgatgcgctgacgcctgccgatcgctatctcgaactgttcgagcatgttcagagcgcgaaaattttccccgacagtaaaacctttcccgactgcgcacctaaaatggacccgctggatatcttaatccgctaccgtaaagtgcgccgtcatcgtgattttgacttgcgcaagtttgttgaaaaccacttctggctgccggaggtctactccagcgagtatgtaagcgacccgcaaaattccctgaaagagcatatcgaccagctgtggccggtgctaacccgcgaaccacaggatcacattccgtggtcttctctgctggcgctgccgcagagttatattgtcccgggcggccgttttagcgaaacctactattgggattcctatttcaccatgctggggctggcggaaagtggtcgggaagatttgctgaaatgcatggccgataacttcgcctggatgatcgaaaactacggtcacatccccaacggcaaccgcacctattatttgagccgcagccaaccaccggtttttgcgctgatggtggagttgtttgaagaagatggtgtacgcggtgcgcgccgctatctcgaccaccttaaaatggaatatgccttctggatggacggtgcagaaagcttaatccctaatcaggcctatcgccatgttgtgcggatgccggacggaagcctgctcaaccgttactgggacgatcgcgacacgccgcgtgacgaatcctggcttgaggacgttgaaaccgcgaaacattctggtcgcccgcccaacgaggtgtaccgcgatttacgcgcgggggcggcctccggttgggattactcttcccgttggctgcgtgatactggtcgtctggcgagcattcgtaccacccagttcatccccatcgatctgaatgccttcctgtttaaactggagagcgccatcgccaacatcagcgcgctgaaaggcgagaaagagacagaagcactgttccgccagaaagccagtgcccgtcgcgatgcggtaaaccgttacctctgggatgatgaaaacggcatctaccgcgattacgactggcgacgcgaacaactggcgctgttttccgctgccgccattgtgccactctatgtcggtatggcgaaccatgaacaggccgatcgtctggcaaacgccgtgcgcagtcggttactgacacctggcgggattctggcaagcgagtacgaaaccggtgaacagtgggataaacccaacggctgggcaccgttacaatggatggcgattcagggatttaaaatgtacggcgatgaccttctgggtgatgaaatcgcgcgaagctggctgaagacggtgaatcagttctatctggaacagcacaaactgatcgaaaaataccatattgccgatggtgttccccgcgaaggcggcggtggcgagtatccgttgcaggatgggtttggctggactaacggtgtggtacgccgtttaattggtttgtacggcgaaccataatatttttacagccagccgctaacttcctgctggctgtaaaattatcctcttcaggaggagatatttaacatcattgccgcctgggtgcgatttttcacttccagacggcgatacagggattccagatgcgcttttaccgttccggtactgatattcagcgctctgccgatctccttattactttcgcccgccgctaacatggttaaaatctcccgctggcgggcgcttaagcttttgagatctttaatgtccttttccggcgtcgtccgccagtctccaggcagaaacatcatccccatcgccgcactatttaccgccaacgcaaatgtctcgacggtactatcacgaggcacaatggccagcacattaaaatggataacttcctgtaaccaccgtttattgcaatccgtcgccgtaattaacaccttaacctcaggaaattgcaccacggttttttgcagcaaccagtagcaaaactcaccatcctgatcgccatcgagcataactaaggcttcagggtaactttccagcttttgccataactcgtctgcctgactggccccctgaatactcactcctggaatacgctgctgtaaactgattttcattccatgaataaatatactctgcctgtcaaacatgactatttgcataactgaatctccacctgaatacgttaaaaagacttaagtagtggaagggtattacccgcgagaaaaaataagaattcgccatttggcggtggccattctacagagatgacgtgtagaaaatagttaccgatataaatagttacagctaaacgcctgaaattacatgtcgagggcactatttaaaacaattttgaggatttccttatattggtggttagtacgcatgcaattaaaaatgaaattccgcgaccacaagccaaaataacaaacggcaaggagacaaaaataagcacaaatagccaacacgtcctctgttcactttaaagggaatcgctgaaaaatacgctctgtttaaggggattcacctttctcagaaagctattccgcccttttcctgctgagaaatcgccacattcggcatgacaacattgtgaaacccggcattagatgttagaaaaaacaataaacaatgcgatatgcgcgttactgtttcgctgtgaacaacaaagcgtcaaagaaatggataaaattcacgcaatgcagttgttcatcaaagtcgcggagctggaaagtttttcccgcgcagcggatttctttgctttgccaaagggaagtgttagccgccagatacaggcactggaacatcaacttggcacccagcttctccagcgcaccacgcgacgggtcaaactcacgccagaaggcatgacctattatcaacgagcaaaagatgtgttgagtaatctcagcgaactggacggtctgtttcaacaggatgccaccagtatcagcggtaaattacgcatcgacatcccgccaggaatcgcgaaaagcctgttactgccgcgcctgagcgaatttctctatctgcatccgggaattgagctggaactgagtagccatgaccgtccggtagatattcttcatgatggttttgattgcgtgatacgcactggcgcgttaccggaagatggcgttatcgcccgtcccctcggcaaactgaccatggtcaactgtgccagtccgcactatctgacgcgctttggttatccgcaaagccccgatgatctgactagtcacgcaatagtgcgttatacaccgcacctgggtgtacatccgttaggttttgaggttgccagcgttaatggcgtccagtggtttaagtctggcggcatgttgacggtaaacagtagcgaaaactatctcaccgccggtcttgccggtctggggattattcagatcccgcgcattgccgtgcgcgaagccctgcgtgccgggcggcttattgaagtattacctggctaccgtgccgagccgctctcccttagcctggtttatccgcagcgtcgggagctttcccggcgtgtaaacctgtttatgcagtggctggctggcgtaatgaaagagtacctggactgaccgactatactttttaagaatgaccacgacagaaggacaaaagagcggatgacgcaggaaaacgagatcaagcgtcccatccaggatctggagcacgagccgattaagccgttggataatagcgagaaaggcagcaaagttagccaggcgctggaaaccgtcaccaccactgccgaaaaagtccaacgccaaccggttattgcgcacctgattcgcgcgacagaacgctttaacgatcggctgggtaaccagtttggtgcggctatcacctatttcagttttttgagcatgataccaattttgatggtgagctttgccgcagggggctttgtgctggcctcccatccgatgttgctacaggatatcttcgacaaaattctgcaaaacatcagcgatccgacgctagccgccacgttgaaaaacaccatcaacaccgccgttcagcagcgtacgactgtagggcttgtcggcctggcggtggcactttattccggcatcaactggatgggtaacctgcgtgaagcgattcgtgcccagagccgcgatgtctgggaacgcagcccgcaagatcaggagaagttctgggtaaaatatctgcgagattttattagcctgattggtttgttgattgcgctgattgtgacgcttagcatcaccagcgttgccggtagcgcgcagcaaatgattattagcgccctgcacctgaacagcattgagtggctgaaaccgacgtggcgattgattggcctggcgatttccatcttcgccaactatctgcttttcttctggatcttctggcggttgccgcgccaccgtccgcgcaaaaaagccctgattcgcggaacatttctggctgctattggttttgaagtgattaaaatcgtgatgacctacaccctgccaagcttgatgaaatccccctctggcgcagcatttggttccgtgctggggctgatggcatttttctacttcttcgcccgtttgacgctgttttgcgcggcgtggattgccaccgccgaatataaagacgacccgcgaatgccggggaaaacgcagccttaaaataggccggatgcggcgtaaacgccttatccggcatacgattttattcggcctggctccccgtaggccggataagatgcgccagcatcgcatccggctataatgcgcacataacctcttgaaactcgtccccagagcctcttcagccatctatttgggagcaaacaatttcattccaactcataaccccagcatataaatccagttggtaacttttatttaacctgaaaccagttttatccactatttataaaattatgtgaagcatttcatagaagaaaaatcactggcctaaacattatcccctttttgcctgatttttgaccatttccgcgatttgttacacattgaaatatcacttttgctgtgcgtaatatggctattcgttagccaaaaaataagaaaagattatgcaagcaacagccacaacactcgaccacgagcaagaatacacgccgatcaacagccgtaataaagtccttgtcgcctctctcattggcacagccattgagttcttcgacttttacatttacgccactgcggccgttattgtgtttccgcatatcttcttcccgcagggcgatcctacggcagcaacgctacagagcctcgccaccttcgccatcgccttcgtcgcgcgccccattggctctgccgtttttggtcattttggcgatcgcgttgggcgtaaagcgacgctggtcgccagcttgctaacgatggggattagcaccgtggtgattggtctgctgccgggctatgccacgattggtattttcgccccgctgctgctggcgctggctcgatttggtcagggtctgggcttaggcggtgaatggggcggcgcggcgctgctggcgactgaaaacgccccaccgcgcaaacgtgcactgtatggctcctttccgcagctgggcgcaccgattggcttcttctttgccaatggcactttcttgctgctttcctggctactgaccgacgagcagtttatgagctggggctggcgtgtgccatttatcttcagcgcggtgctggtcattatcggcctgtatgttcgcgtgagcctgcatgagagcccggtgtttgagaaagtcgctaaagcgaaaaaacaggtgaagatcccgctgggtacgctgctgaccaaacatgttcgcgtaaccgtactgggtacgttcattatgctggcaacctatacgctgttttacatcatgacggtctactctatgacctttagtaccgccgccgcgccagttgggcttggcctgccgcgtaacgaagtgttgtggatgttgatgatggcagttattggttttggcgtgatggtgccagtcgctggattactggctgatgcctttggtcgccgtaaaagcatggtaatcatcaccacgctgatcatcctgttcgcgctgttcgcctttaacccactgctcggttctggcaacccgattctggtttttgccttcctgctgctggggttaagtctgatgggtctgaccttcgggccaatgggtgcgctgttaccagagctgtttccgacagaagtgcgttacaccggagcaagcttctcttacaacgtagcgagcattctcggggcttccgttgcgccatatatcgcagcctggttgcagactaactacgggctaggtgcggtggggttatatctggcggcgatggctggcttgacgttaatcgccctgctgctgacccatgagacgcgacatcagagcttgtaataagagtgaaaagcctgatgcgctacgcttatcaggcctgaatttccatacaatatattgaattcgcaaggatttgtaggccggataaggcgttcacgccgcatccggcatgaacaaagcacactttgccaacaatctaaatctgtttaattgccggatgtcagacatccggcaattatcatcacttcttcatctggctcaaaatcgtccgacactgattagcctccccttcggaaggactgatcagtgccagtaacgccgccgccggtgttaccagcgttgccagtgccgcagcaacagcaccacgggcaatcagcggtccggctttcaccccagcctgcggatttttaaacgtcccccgcacatacagcgggctacgcagtgtgataatccgaattcctttactctccggatcaatagtcaaatccagctgttcgctagcaaaacttgccgtgccggtaacattaatcaacgcgttctcagtatcgaaagcaaaaatctgcgggcgcgccacgccgttggcaatattcagattcgccgccgcgcagttcacccgcacctcatcatcaccaaatatcgcaccgacaatgtagttgccgacattcagcccaacaatctccatcaggttgcggctcaccagcccgtcattcatcaacagtttcaggttgccgttactgttgcctaaaagtgccgccacgctgttaccgctaccgcgtagttccgcgtcaccgttcatttcccccagcgtcttctgcatcagttccacatcgggcatcagttctttcagtttcagtcgacgagcctgaatatctgcccgcccctgcatcggctttttatcgccttccagatgaatattcgccgcaatgctgccgcccgccatgccaaatttcagcggttgcaggcgcaggtcagcatttttgaggatgatatgagtagaaagatcgctaatcggcaggctactgccatgctcaatgcgccgccctttgaagcgaacatcggcatccataacgtcccatttatcggtttcgaagcggtcataaggcagcactttgcccgcaggctgaacgcttttttcgcccttcttctgttcagaccgtttgctcttttctgcccctttcccggaatcaacgccaatcaacggtcccaggtccgccagccgcaattgccggctctcgacatcaccttccagttttggtcgtggctttccggtggtgtagaccagagaaccgtggatatcgctatcaccaattcgcccattaaaaccgcgataatcaaagacgctgcttttttcagtgtcgattttcgctaccagccgaccatccgtttcaaacggcggggtatcgggcagcagaacgcccgtcagttcatagagatcacccagactatcgccagaaaatttaagccgtaaatcgacaccgcccatcttcattgggtcattcacgacgccatcaaaagcaacacgggtgttaccagagcggaaatcagcctgtaccggaaacggcgtcccttcgccacgcagcgccagcataccgcctatttttcccgtacccgtgagcggttcaccgttatatcgtccctgcgccttcaggccaaaaacgtaatcgcccaccttttctttatccgctttacctttgcttccagtaacttcgctgaacggcagcggcttgcctaagggatcaacaaaaatctccagatccgctttgcttactttgtcatcaatggcgatccgcccttgatcgaaaagaatattatccagccgaaagctccatgcgctcggctttgcattcgcgtctttgttatcatcgttggcaagattaaacgtccagttattgttcttttcagagaggcgaatcaggcgcgcgtcgggcttttcgagcttgatccacggcagccagaccgttttggtcagcagcgccagcggggccagcgttgcctctacgcgtggcaaatgcaccatcgtgacttcgggaatatccggtggattgccaagaatgatgtcttccgcgtgtacatggggccacggcacccagctgcgccagccagtttcttgtttttgccgctcccacaccacgcccagatcgccacggatagcgaacggacgattcaactccgcagagactttctggttgatagtcggtttgagtcgattccagtcaaaagttgcaatcaaaatgatcgccacgacaatcaacaacaagaaagccccactaatcgcagcggttattttgcctgccttgctcatcgttcgcttcctcatattcttcctgtgccagtcctaaagatagtccagccaggcggaaaatgaggcagcttatagcgccagaaccgccgtattcagcgtttctatcggtgccgggcgactaagaaaccagccttgtgcggcgaatgcggggctgttctgaacatcacgccactcttccggcgtttctacgccctcgacaatcaccccgcgacaatagcgattcattagatgtaaaagctgagaaaagagtgtgcgtccttccgggctctgacgcagcatcacaaacagttctcgcgcgattttgatgtagtcataacgcacttcacttagcgcagagaaatttgccatcccggtaccaaaatcatccagccacagcgggccaaattcacacatgctggcaaaggtactatctttcggcagacggatatgctccaccagttcgaaacgcagccagggaagacgctcaatctggcgcaggatttttggttgctgacgcagggcgatgagcgtagggccatcaatattgacgcttgccagcaggccgtgctctataaagaagtcggctttttgcgccagcaaatcaatctgctctttcacaacctccatccgatggctgacggtgatttcagtaaaatagcgatccggcggcaggcgttggctagggttcaagggatgcgtgaccaccgttaatagctccacggccattaaccgcccgcatgtttgatagatcggctgccaggtgtaagcacgctcacactgcaaccaaaaacgccgttcctgcaagctctcgatgcttgcttcagggttgcttattcgctggataacctgccttatcatcaaagatgtcctgtgtttaaaagtgatgctgcccggactcgacaaagattatcggcgcgtaagggcagaactttaccgcctggccggggtaaatttcctcactccacaacggaatctttcaggaatacgttctggctcaaaaaaataatggaacactgttttaatatggttgaccagcaaaccaccacagcgcaaactaacgctaattttttacagatcaggttcacgactatgtccaaaaagattgccgtgattggcgaatgcatgattgagctttccgagaaaggcgcggacgttaagcgcggtttcggcggcgataccctgaacacttccgtctatatcgcccgtcaggtcgatcctgcggcattaaccgttcattacgtaacggcgctgggaacggacagttttagccagcagatgctggacgcctggcacggcgagaacgttgatacttccctgacccaacggatggaaaaccgtctgccgggcctttactacattgaaaccgacagcaccggcgagcgtacgttctactactggcggaacgaagccgccgccaaattctggctggagagtgagcagtctgcggcgatttgcgaagagctggcgaatttcgattatctctacctgagcgggattagcctggcgatcttaagcccgaccagccgcgaaaagctgctttccctgctgcgcgaatgccgcgccaacggcggaaaagtgattttcgacaataactatcgtccgcgcctgtgggccagcaaagaagagacacagcaggtgtaccaacaaatgctggaatgcacggatatcgccttcctgacgctggacgacgaagacgcgctgtggggtcaacagccggtggaagacgtcattgcgcgcacccataacgcgggcgtgaaagaagtggtggtgaaacgcggggcggattcttgcctggtgtccattgctggcgaagggttagtggatgttccggcggtgaaactgccgaaagaaaaagtgatcgataccaccgcagctggcgactctttcagtgccggttatctggcggtacgtctgacaggcggcagcgcggaagccgcggcgaaacgtgggcacctgaccgcaagtaccgttattcagtatcgcggcgcgattatcccgcgtgaggcgatgccagcgtaaacgcagcatatgcaaaaggctggataaagtgttacccctctatccagctcatccataaatacctgatggttgtgctaactcatcaccatcaggcattactgtgcaggtggaatatccgtcacttcaggatgtacgtcatccgtggcgacagaggtggtcgcagcggcggtagatggggccatgatttgatcccagaccgcctgcaacgctttcatgttaaattccggctcgcctttcggctgcagcagtattaacgccatatcattgctcaactgttgacgcagatcctgatttaacatctctaccgtcaggctattaaggaaatcctgccgcagtttctgatattgctccggcgcgatatcgacaacctgattttgcaagctacgcatccgctgacccatcagaatatcggtatcagctcgtgcataggcggcaaacagtttctgcagctccagtttcttttgcgccactaacgcattgaactcttcttccggcagacctttatcgcgaaccttcgccagttcacgcgccaccagattaaggttgctgttcagcttgtcgtttggactttcgatgttgatggcacactgcgcacgcagatacagcacacggcagtcaaatccaagaccgatgtctttgctgttactggcacttaacgcttgctgaacatgccagaacagcgcctcgcgggccaggtccgcacgccagtagcgcagcagtgcggcactttcacgaatcggctgccacggcgtatcccacatgatagataaccggtcctgacgcaccgcgtcagtcataatactcaccgcttccgcacgcagcggagaaagcgtcggcaccggagctggcgtttcacgtttgcctttcagttcgccaaacgttttgtttatttggtcgacaacgctgcgcgcatccacgtttcccaccaccagtagcgtcattgcatccggggtgtaccatttctgatagaaatctttaattttttccgcttcaacgggttgtttcagcggatcggcaggatcgtgacctaacaaggtactccctttcagacgatagcgccaccagccctctttagtatcggcaggccaggttgccaccatgtcctgactttgcagcgcgtggttgatggtttctggtgtgatggtcaatttgccagtggcatttgccagataagagagcgcttctttcagcaaatcgttacggttattgggcaaactcagattaaacagcgtggtgtcataagagacaattaccggcggcatcgggcgtttagggtcgatcccctgctgccacaaactacgcgcctgtgctgcgtcaaggccaccgctttgcgttagcgcaatacgagggatggcgtgactgtaaccgctctgttgtgtactttcggcgaggctaccggtattaaccagcaggcgaatttcaacacgatcgctgggacgctggggggtggtcagcacttgccactgtaaaccgttggaaagcgtcccctgttgccatgctggatcaggctggagcgcatctgcctgcacatagccagcagtggccatcatcagcaaaccgcccgctaaaagtcgaatttttgtgccctgcatgtgaacccctgatcaactatcctggtaataaaaaaactgcccgttgtcggtcagtctaaatgacgttaaaaacacttcgtgttagaccgcaagaacatgaaaatgtcacggaagaagtgaaataaacctgaactcacccaggtggtaagttcaggcacaggggtcaattatgcgcaaacacccgcactcggggaagggagtgcgggcataagtgatgagattaagaggataattcgtgcgttttgccatccggcgcacgattattcagcacatcgtccagttttttgtggtccagttctttcacccacttagcaacgacaatggtcgctacgccgttaccgaccaggttagtcagcgcacgagcttcactcataaagcggtcgataccgaggatcagcgccagacccgctaccggcaaatggcccaccgcagagagcgtcgccgccagcacgataaagccactacccgttacccctgccgcccctttagaagaaagcagcaacacgattaacagcgtgatttggtggacgatatccatctgactgttagtggcctgggcgataaacaccgccgccattgtcaggtatatgcttgtgccatcaaggttaaagctgtagcctgtcgggatgaccagccccaccacgcttttacggcagccgagtttctccatcttgtcgagcatacgcggcagcgcgctctcggaagaactagtccccagtacaatcagcagttcttcacggatgtagcggataaatttgaagatactgaaaccagtcgctttagcgatactacccaataccagcaccacaaacaggatacaggtaatgtagaaacagataatcagctgccccagttgcaccagtgtgccgacgccgtatttaccgatggtaaacgccattgccccgaacgcaccaataggtgccagacgcatgatcatattgatgatgccgaagatgacctggctgaaactttcgatgacgttaaaaatcagttggcctttgctgcccagacggtggagcgcaaaaccaaacagtacggcaaacagcagcacctgcagaatgttaccgctggcaaatgcgccaatgacgctcgccgggatgacatccataatgaaggcgacaatgccctggtctttcgcctgatcggcgtaaaccgctaccgctttcgcatcaagcgttgccggatcgacgttcattccggcaccaggctgcacgacgttaacgatgataagaccaataatcagcgcgatggtactgacaatttcaaagtaaagcagtgcgactgcgccggtacgaccgaccgccttcatgctttccatgcccgcaatgcccgttacgacggtacaaaagatgacaggagcgatgatcatcttaatgagcttaacgaagccgtcgccaagcggtttcatttgctcgcctatttcaggatagaaatggccaaggagaataccaatggctatcgctgtcaggacctgaaagtaaaggcttttaaacagagaggttttcatagggtgtcctttagtaaaaccacaggtcttgtaaggttatggggtacctgcggccttaaaataacacccagacaacatcacagaaatgtacctggatcataattgaaacaaaaaggttaaaaagtttgagctggctcgcacaaaccagcactttttaaagttttgtaatcagtttggggtagttacttttcttccaggtaactctcttcgaagatttcaatagggagtgggcgagcaaaaaggaagccctgggcaataccaacgcccgcttttgccagccagtcgcgttgtgcttcagtctccacgccttcggcaatcatttgtaagttcaggctctgcgccagcatgataattgcagcaatcatgctgctatctcccggcaagccttcaacaaacattttgtcgattttcagtacgtcgattggcaagcttttcatatgctgcagctgacgcagccctgcgtagcccatgccgaaatcatccagcgccacccgaactccggcattgcgcagcggacggaggattgccaccgcagcatgagggtcgtcaatacgtcggctttctgtcacttccagaatcagtgttcccggctgaatgcgatagcgggttaacagttccagcatatccgccaccatattcgggtgcatcagttgcagcgcagagaggtttacgctcaagggcagcataatgccgcgctcttgccaggctgcaagcaatcgacaggactcttccagcacccagtgaccgacggtaaccatcagcccacagcactcaatgcgatcgattaagccatccggcaggtcccaactgccatccggttactggatacgcagtaacacttccgcactgaccagtttaccgctggtcatctcgacctgtggctgtaaccaaatagcaaactgatgattttccagtgcattaaggatatcgctctcttccgtcaaccgcttctgggcggcttccatctgctgcggatcaaagaactgaatctgattcttgcctttatggcgagcggtaaatgccgcagaaatagcgcgactgtaaagctgttcggcggtgagatcgccgtagaacatcgccacgccaatgctacagtgcggacggagttgaatacgttcaatcggcaggcgctcgctcatgatagtgagcacttgctgacctaaggtgattgcgtgccacggttcctgtacaccgttggcaatgacagcaaagtcataaccgctaatctgcgcgaggatcatacgtgggctcagtacgcttttgagtttttccaccagcgtcagcagcagaatttctcgttgcgcctctttcagcacgcccgcagtatcacgcagggtttcacaggtgatgatcatcagcgcggtggtttgtttacgcgcgacaacctgctccagcatctccatcagcaaggctttgttcggcaaatcgctcaccgggaagcgcatcgcattttcgttctgttcttcataatggcgctgcagcaattgctggttgaggttgtaactgcgcaccaacataccgatttcatcgtcctgatgcagacgcggtaatgccagttggtgaccaacaagctccttggctgggatggcgttaagttcgcgagcaatattgcgtaacggatgcaaaatcaggcggttaatgcaccagctgatggcgacggtcaggataaggctcaaaagtaagtaaatggtcactaacgtactgagggtgctcatcacgaacttatacatacggaaggaatccgcctgtagtaccagataggcaattggctgcgggtttgccggacgttcgaggctgtaaacgcccaggctgatttgaaccggtagctcaaacaggcgagtaaccattaccggcaccgggcgctctggaataaaacttttacgcagcgcctggaactggttaggcagcactacatcggcacggctgaccacgcctgccggtttaatgctggcaagaatagcttccgcttcgggaatatcgcctttcaaaatagcactagataagggttcgcggacagagcgagcaatgctttccagttgcgtagccgtgttatagcgattctgctggaccagatggaacagcaaaacggtgcaaaaaataaaaacgaacaccaggacaacggctgccaccattgccatctgcttgattgttaacgagcgacttacgcgcaaattgtctccccccggaaatcccagattgccgcccgagtatacccgatcgcagcggcattaagagaggcgctatctgaaaacttaccagtcggcgtaaggtatcagcggctgcggcggtaaatccatgtcaccctgccatccggcggcggaataacgtacgtagagcaggaaatggctgggtgcgtaatctttcgcctgctggatatcaattgccgtgccaacaaaccagttggaagtaacacgtcgttcaagtaatgcccgcgccgtgtagccgaagccctgactgctgccgccatcgttggattgccgcgcagcttcttcctgccagtcggtcgggatcagattcatcagcggataacgcggcatggttttggtgcgactatggctccagctgccagacgcacccagctcccagctccagttttccgtgcgctcccgccacatcaccggtatggcaaagctcaggtattcctgcggactgtagtaaccgccctgaccgagactgtagccactcagatctttgtcgtaatgccagatcatgttgttcaggccgattgtgacgcggcgattgttctggttaatgaccttatagtaatagcccgtcatccagcgcacgcgccagttatcttcgacatttttaccggttaactggtcgccactaaggcttgcccagacgccgtttgcttcacctttatcgtagctcagacttagccccacaccgtcggcacgtacgccaccccattttttcccggtattgctcggggagtctttttgcccaccaaaggccagcaaagaactggagatgggccgacggtgggcgttaacggtgtaacccagcggcccgatatcatcgctgtaactgatgccgccgaccacatccaccacgttgaagcccatcggcgtggtaccgatatcccagctccagacgtcatttcgccagccgaccgccacgctggcaccggaatcgctctggctgcggttgccgctacagtcctgtaatgtacaggtgccccagttgtcatcccatttgccatcggcattagtggagaaactgccgacgttcatattgacgaaatcactgcgaaagaacatccgcccgtcagaatacggcgcatccacctgcaacatggtagtgtgcgctttcagatcggagtaaccaccggtgccgctgctaccccagtaatcgtgctcaagggtgacgttaagatcctgctggcgatagaggtccgccgcatcgctgcgcacgccacgtttcagccagtcatctttctcgtcgttacgggtcagtcgggtaaaggtgtcgttatcctgcggacgcgtcgtagtcacaccggatgcgaccatggcgtctttgtaggtttccagcgcctgcgttggatcgcccgcctgcgcttcaaacttcgcaccatcacgcagcaccatcgcgctttccatgctcggtggctgagattttgcctgcgggatcaacttattaaacgtccgctgcgctgctgcggtatcgccaagctgcgcctgtgccagcgccacgcgccgctgtgtgttcaggctggcgttatcggtagcgggcagtttcgccagctggctacgtgccgccgctttgtcaccggcagcaatatccacttccgtcagaccaagaatggcgtcggcgttagctggctcccgcgtcaggacattctgatatgcagcgcgggcggcggtgtaatcacgtcgttgttgcgcccagtcagccagcgtgaggtcaatacgcgtggaaggtggttgctggcgcagcatcgcttccgcttctgcctctttgccgctttctcgcaggcggttagcggtttccagcacctgatcgctttgcagtcgattaaccagctcctgaatattgctgttccactgcgcacgcggcaggctattgatatgcgccagcgccgctctgtcctggtcatgaccagagaggtacagcccgtaagcgtaaacctgctccgggtcgttgctcttctgctgcgccagattgcgcattaacgtatcggcctggctgcgttgtccggcctgccagagatcctggctaagtcggtaagtaatccatacgctgccggggtccagcgccagtcgttgccgctgaagtgctgccgcctgcgcccatttgccctggttttccagtgcctctgcctgctgtgccagacggtcgttttgcaggctgcgttcgatatcatcaatgctacgccgctgactggcagagaggctggcgataaacgcttcagctttttctgggctttgctggcggtaaatatttgccagcccgcgcacggcgttagtgttgccgctgtccatacgcaaggtctgctgataataacgttcggcggcgggataatcttttcgcgccatcgccacatcgcccagccccagcactgcataactgtcggtgttatcgacattacgcgcctgctggaacaggcgttctgcccggtcaggattattggctttcagcgcagcatcgccctgctggatcgccagccagtagcggtttactttcagcagactgttccatttgtcgttgttgctgctgtgcgggtccagtgcgagggctttttccagattcgccactgcattggcgcgatcgcctttctgagaatacgcctggcccagcgcccccagagcttcactgtctttcgggttcgcccgcaccgcctgttgtagttcgggaatggctttacccgccataccagagtccaccgccgctaaaccttgcgcacgagcgcggaaagcaggatcggccagctgtttttgctgttctgccagttggctttgcgcagccgccacgctatcgccatcactaaagatgctgagatattttttcagcgcgctcacactggcatcactgacgggcatgtctttaatctgcccgtaccagattttagaggccccttcgcgcccggcgttgctttttgccatctgttccaggacggcaaaaccttcgtcacggcgatcgctactaaacagcaatagcgccagattgttttgcaggcccgtattgcccggtgcatccgcattgatgcgttttaactgattaatcgcttcgccacggcgagccggaattttcgccaccgtactccagtactcgacagcaatgtcaccttccggcggcgcaccgttgaacagtttgttgtaactcgccacagcttcttctgcatgaccggtcgtcgcctgcaatcgtgcctgttgcagtgcctgacgaccatccggcgtggaaagtagcatcgtagtccggctgcttttatacgcattactactcggcgctaactggctcagccgatcgagctgtttttgcgcgccatcaatatcgccctgacgtaacaaagaacggaaacgggcggcaacgacgtccgggttattcggatcaataagttccagccgatataagctctgttgcaccagatcttcacgatgggtcgcttcgcctaaccgaacttgctccagcaactgttgctgagcggttggtgctgcctcgaccatcggcatgacggccagaccgagggaaagcgtgaatatgtttagtgtgaatttgcgcattcctggccccagtcaggtaattactttagtgactatttgcgcattcctggccccagtcaggtaataactcaccttttgtgctgaagcggaaacggtgttgatcccagccttgtccaaacagggtcagcacatagttgtaataggcatcgctgccgggaaagttatcggccacgcgctggcgctgaacggcctgcgcatcgcggttttgtaaaaagggcagcatggcggcagaaaaaccgactggtcctttaccctgcgctttccccgtagccacatccactttttccggcggataaccgtttttctcagtgaatgtcgccatcggtttaaaccggttgagcatccgcgctttttgcggatcgctgtcaggcatcatgcctacccacatgtaaacgcggatagcgtcgtagctgctgatcaatgttttttcggcttttagctgccagcctttgtctttctcatagcgcacccagtctgggctaaaacctttcggggcggtttccagcaataaacgttgattggtttcgcgcagcgtggtccacggcgcgccaaagcgggtgaaatactgcgccagcgtcggcggcaggtagctggggttaaaacgccagctgttatcctcagcaaaacccactttgcccggtaacaacatggaacccagcccaggcaccgtcaccacttcctcccgcgcgatacgttttagcaacgcgctgccgatgtcggtataacgctgctctttccacaaacgccccgcctccagcaagctccaggccatccagacatcaccatcggaggcgctattgctgtccagcacttcccacttactgttctctttcttgccccacagccaggcgggcaaacgttcttttaaagaaccctgagcgagattgttctgcgtccagtcgagaatattatcgaaagctgcacggtcgttagccgccagggcagagaacatgccgtaactttgcccttcggaggtggtgattttgcgcgcgtcgctggggtcgatgacgcgcccttcctgactgatgtaatcctttttaaactgctcccaggcaggccaggtacaggctgcctgaacactaaaggcagccagcagcagcatcgtcacgattccactacgcaacacattcatcttcaattactcgttatccgggttaagacgacgacgactaataattcgcagcagacgccacagtacccatgccagcaatatcacactgatagccgccagcaccgccagcagaatcggatggtttgccagcgcataccacacgcgctcgaaccacggcagatgacctacgtaataaacgtcgccaacacgtaggctgttgataccggactcgcggatcaccgcgacgctaccgaacatggtggcgcgtttgccgctatcgttcaccgcatcgttaagcatttcataaccgcgtgggctatctgccaacagcgcaatcacgctgcgctggtcgttatacgggctctggaagccaatcaccgccgccatcgcaccggaagaggtcagcgtactccgggtttctgccgcgcgatcgctctcgtccggcacaatgccggggaacggggtctggcgcatcggtgttttcacccagctttcggtcgcctgcaccaataggtcgatctgcttatcgtctttcagtttgtccgggataccaccgatgatcatgatgtcggcatctttgccctgaatggtgctgccatcatcggtcaccgtcagattaatcgccgggaagcccgtctgtgcgccgataaaaccaacagtattcagcaacgtttccatctgtgcttcgttaggcgctttcggcatcacggtgatggtttggctcagatccgccatccggctgaatgggaagcccgcgttagcaaaggcgcgtagatccggcatcgggatgaagtggtaatacttgctgaagtcgatggtggagtcgtcaccaatcaccacatgattctgcaccggctggaaggtaatacagttatccacgctaccgcccggcatcgggttcatatactcaaagtcgaagcgcagctggttggtcgcgcccagtttcagcgccggaatagagacatctgttttgccatccagcaaaccttgtaataccggaatccgcagcagcaggcggttcgcctcctgtttgctgctcaggttgaaggattgcaggaactggttattcaggctgatatccatccggctactgtctttcaccggcggcatggtgtagcggtaattaatatccatatcaatgccggtactgcgcatcaggtagagatccggcggcaggtttaggctaacgttaatcgctgctggctcaagaccgctggattgtaactgttcttcataggttttcagttcgccaaatgtgaccggacgatcggtacgtacccagttcggcgcatcgtacggcttacgcggtagcagcggtttcacttcattcactaccacgctttcaccacggaacagaatgttaccctgagcgatacctttcgctgcctgcaacaggtctttgtcgtcacgaccaaacaccaccagcagtttgacgtaaggattctgcggatggttaatcatctcaatcaccggggcttttaccgccggatgatcgcgcaggaagtccggccgtttgtcgttggttgcaaagacaatggcattgcgatccggcagttggttatagagtaccgggaagttctgcccacgccagccagaacggctaccaaaccagctggcgacaatggcagaggcttgttgcagcccaacatccggcgcacccgcaaagaccatcggcaaggtgttggtgcggttatcgctcgggtcaaagaatggcaccgggaagtgactcaggtcattcttcacattcagggtctgataggtcagatccagtccactgctccgcccaacatccagccaaagcgtggtgctggccggtttttcgcacacgtcctgataatggccgacaaactccagccgtacacggttgaagtcgctaataaacagtgggttaatgggcatttgcgccagcgtttttttacccaactgttctttggtcactggcagcacgcccatcagttcatcattgagataaacctttaactggctctggacaggcagtaagcttgggcttggggtgtattcgaagttgagcatcgccttcgtcaccacttcatcgctgcgcataccaaactcaatgctgccgttcgggttaatgccacgtagcaccatgctgcccggcggcggtgcaatttgcgcaaaggtcagcttcacatcacggctaggaccgttctgcgccacgactggcgcatcagcgccctgcacgcccggcatcacttgccccacctgcggattttgttccgtctgggcggctacagctggctcagcattgatcagtggttgcgttgctggcgtcgcctgcgtcatgaaagaggggaacgcactcatccccatagccactgcacaaatccagaatagttttcttttcatcgcgttatcatcattgttgagccaaagcctgatcgcttggttgtgccgtttcgctccgctccgggcggcgcggaataaagcttacaacccaggaaaccagagaagtcagcacacggaatatgcccttcacgctagaaggcgcaaactccgccagatggcggtagccacggaagccgagcttcagaatatccagcagactttccagcggcttatcttccgggtagctgtcctgccagagcgcccatgtatccgcacgggcaaacgtacactgcacaaaatcgatatgttgctgggtggtgagcggcattaatttcagcccaacttcattacccatcacgcgcgccacctgggtcgggaagacgtattcctgctgaccgcgtttaagcaacagattcactttctgcccttccagaatctgcgcctgaccgttgatcttgatccccaaaccaccgtcggagaaatcctgaacggtacagctgaagaggtgaccatcttcgcgggcaattgccgcgggcatcgtcatctccacgcggtggcttcggcgtacctgtttgctttctacgcttaccgcaactgcgccgccaagaacaatcaggttgtagaacacccacaccatactgacgaccacggtgagcatctcggttggcgggccatagaagtagcgccagatgcctaccgcaacgcccaccaggttgagcaggacaaggaagatgtagggccggctgatcacccagtcgacgtactcttcttccaccagtccacctttggcggtgacgttaaatttgcctttgtgcgggttaatcagcgccaccagcgtcggtggtgcgatataccacgccagcaccgtttcgtagatttcactccagaaagagtggcgatatttgccctggatcttggagttggtcaggctggcatggatcatatgcggcagcacgaatagggcgatcatcaacgctggcgcatagatgatgtaggcatgaagcagcaggaacgccagcggcgcagtcaggaagatcagccgtggaatgccgctcaagaagtggaacatggcgttgacgtaacatagccgctgagcaaacttcagccctttaccggtgagcgggttatcgagacggaagatttgtaccatcccgcgcgcccagcgaatacgctgaccgatatgcgcgctcagactttcggtcgccagccccgccgcctgcggaatacgcatatacgcggaggtatagccacgacggtgcaaccgcagagaagtatgcgcatcttcagtcacggtttcgacagcaatgccgccaatttcatccagcggcttacgacgaatcaccgcacaggaaccgcagaagaaagtggcgtcccacatatcgttgccatcctgcaccagaccatagaacagcgtgccttcgttcggcgttttacggaaacgccccaggttgcgttcaaacgggtccggactgaagaagtggtgcggcgtctgcatcatcgccagctgtttttctttcaggaaccagcccatggtcatttgcaagaagcttcgcgttggtacgtggtcgcagtcgaaaatgctcacgaactcgcctttggcatatttcagcgcattgttgatgttgcctgctttcgcatgttcatgagtggtgcgggcgatatatttcacccccacgttttgcgcaaactggcgaaactcttccctgccgccgtcatcaaggatccagatattcagcttatctttcggccagtcgatacccaggctggcgtaaatggtatttttcaccacgttgagatcttcgttgtaagtcgggacaaagatatccacgctcggccacaggctcatatctttcggcaatggcaccggctgacgattcagcggccatactacctggaagtagccgagcaccagcacaatccacgcgtacgtttcagcgaagagcagaataagcccgcacaccaggctgaccggatcgtcccagttcagcgtagaggtgtaacgccaccagatataacggcaagaaacggtcaggctcagcacaatcaacattagcgcgctgaagcgccccggcatccgccgtacgatcagcgctaccccccacagcagcatcaggaagataaactgcgccagcgggttaaacggctgagtaacgcagattaacgccagaatcaggctgaaggtgacgatgataccgaggatcaaccgccgcgccccggcactcaaatgaccgagctcttttttctcatccagatgctgtgttttatggctaacgcgctcaggcagctcgttcatccattgatggtaacgtccacgaatattttgcagaccactaaatgcccgcctgcgcggtttcggcgtttctttgcggcttgcaccgatcaataaccagcatgtttgaatgagataacggaccgggtccagcggacgcggacggctggcgttgatatgcggatacaggtttttatgttctgcgcgaatacgctgccagcgcgggtgctccagcggaataaaaatccaggccaggatcatccagaaacagccgagcgtcgcgctgaaagcgctcgcaccgtgacgacgataatcgcgataacgcccgataagccgcgcgttgaccggcgggataagcaaccaccgggtcaggatactcatgatgcactcccgactggcgtttacatcaacttgcactcccgactggcgttttcagcccggagtagttcaacaggcaccagttcgccagcgtcagtatctcttcagccgccagcgcatcactgcgatattcacctactggttgcttagccgccaggcattcagccatcgcttcatcacgatgaatgagcatcggcagtaatcggcgctggctttgcaaccaaagctggtaaatatcgtcctgaacctgactgccaatacggaagtcattaatcaaaatatgtgcgccatccggcagcgcttgctgatgcagtcggatatggcagttggcatccacattgacgattgccaggctgtgatcgcacaaactcagcagctggtgggttatctggctggcatcacgcggtaagtcgattaaaatccactggtaacgcccgctggcttttagttgctgtaagccggagcaaatatcgctcagccgggtttgccagtgctgtggattttcttgttcttcaatggataactgaccaaaaggcagcaaatcgagctggctggtgtagcgcaacccagcgtcacgccagtcctggccatccagcatcgctctggcccagccctgacggtgggtaaaatcaacattaaaactcaggcgcaacaagttgtccgggcaggcatcgaccaccaggacattttctcccaacatttgtaaactccaggctaatgcggcggtgatggttgttgtccccacgcctccccgcaccccctgctatcccagtacggccattcaccaatcccttacttttgttgcgcaaactctgccagcaacggccagcgttttaatgccgcggccaactgttcgcgttgggaaatatcggcataatcaatatcaggcagactaaatgcctgctttaacgccacaatatcattctggaagatatagcctatcgcgggatcaggcagagtatctggttcattgttattcattttgcttgatccctatgaaataaccgtaccgttcatgagacaattctaaccgtgagcatttcgccggtttattgtttacggcgagacgggaatttgctcactttttgactttccgttacgcaacagaaaaagttaaaaacgaaaagactaaaatcacacgtcttgtgaccttctaaattgattcacatgctaaatctgataagttttaatttcaatggtaggtttatttcttagctttcgctagtaaactgataatcagacaaaatggtgacatgagggacattgtggaccctgtattctctatcggtatcagtagtttatgggatgagctgcgacatatgccagcaggcggcgtctggtggtttaacgtcgatcgccatgaagatgctatcagtctggcgaatcaaacaattgcatcccaggctgaaaccgcacacgtcgcggtcattagcatggacagcgatccggcgaaaatctttcaattagatgattctcaagggccggaaaaaataaaattatttagtatgctaaatcatgaaaaaggtctatactatttgacccgtgatttgcagtgttctattgatccccataattacctttttattcttgtttgcgcaaataacgcatggcaaaacattcctgccgagcggcttcgcagttggttggataaaatgaataaatggagcaggttaaaccattgtagccttttggtaattaatcccggaaataataacgataaacaatttagtttgttgcttgaggaataccgtagtctttttggtcttgccagtttgcgttttcagggtgaccaacatttgctggatattgccttctggtgcaacgaaaaaggggtcagcgcccgtcagcagcttagcgttcagcaacaaaatggtatctggacattagttcaaagcgaagaggcggagatccaaccacgcagcgacgaaaaacgcattctgagtaatgttgctgtactggaaggtgcgccgccgctaagcgaacactggcaactgttcaacaataacgaagtcctgttcaatgaagcccgtaccgctcaggcggcgacggtggtcttttctttacagcaaaatgcgcaaatcgagccactggcccgcagcattcataccctgcgtcgccagcgcggtagtgcgatgaaaatcctcgtgcgggaaaataccgctagcctgcgcgccaccgatgaacgtttgttattggcctgcggtgcaaatatggttattccgtggaatgcgccactctcccgttgtctgacgatgatcgaaagcgtgcaagggcagaagtttagtcgctatgtgccggaagatatcactaccttgctgagtatgacccagccgctcaaactgcgtggtttccagaagtgggatgtgttctgtaatgccgtcaacaacatgatgaataaccctctattacctgcccacggtaaaggcgttctggttgccctacgtccggtaccgggtatccgcgttgaacaagccctgacgctgtgtcgccctaaccgtaccggcgatatcatgaccattggcggtaatcggctggtgctgtttctcagtttctgtcggattaacgatctggataccgcgttgaatcatattttcccattgcctactggcgacattttcagtaaccgtatggtctggtttgaagatgatcaaatcagtgccgagctggtgcagatgcgcttgcttgccccagaacaatggggcatgccgctgcctttaacgcaaagttctaaaccggtcatcaatgccgagcacgatggtcgccactggcgacgaataccagaacccatgcgactgttagatgatgctgtggagcgcagtagttgatataagatgctgtggagcgctcatcatgatgaccatcagcgatatcattgaaattattgtcgtttgcgcactgatatttttcccgctgggctatctggcgcggcactctttgcgacgcattcgcgacaccttacgtttgttctttgctaaacctcgttatgttaaaccggccgggacgttacgccgcacggaaaaagccagggcaaccaaaaaatgactcaatttacgcaaaataccgccatgccttcttccctctggcaatactggcgcggcctttccggctggaacttctattttctggttaagttcggcctgttgtgggcgggatatcttaacttccatccgctcctcaatttggtgtttgccgcgtttctgctgatgccccttccgcgctacagcctgcatcgcttgcgccactggattaccctgccgatcggctttgctttgttctggcatgacacctggttgcctggcccggaaagcataatgagccagggtagccaggtggcggggttcagtaccgattatttaatcgaccttgtcacacgctttattaactggcagatgattggggccatttttgttttattagtggcctggttattcctgagtcaatggattcgcattaccgtttttgtggttgccatactgctatggctgaacgtacttaccctggcgggaccaagtttctccttgtggccagccggacaaccgacgaccactgtaacaacgacgggtggtaacgcagcggcaaccgttgcggcgacgggtggcgcaccggtagtgggtgatatgcccgcacaaactgcaccgccaacaacggcgaaccttaacgcctggctgaataatttctataacgcggaggcgaaacgtaaaagcaccttcccgtctagcctgcccgctgatgctcagccatttgaactactggtgattaacatctgtagcctttcctggagcgatatagaagccgccgggttgatgagccatccactgtggagccatttcgatattgagttcaagaactttaactccgccacctcctacagtggcccggcggcgatccgtttactgcgcgccagctgcgggcagactagccacactaatctgtatcaaccggcaaataacgactgctatctgtttgataaccttagcaaactgggctttacccagcacctgatgatgggacataacggccagttcggcggttttttgaaagaagttcgcgaaaatggcggcatgcagagcgaattgatggatcaaacaaatctgccggttattttgctgggctttgatggtagcccggtttatgacgataccgctgtgcttaaccgctggctggacgttaccgaaaaagataaaaacagccgtagtgccacgttctacaacacgcttccactgcatgacggcaaccattatccgggggtcagcaaaacagcggattacaaagcgcgggcgcagaaattctttgatgaactggacgccttctttactgaacttgagaaaagcggtcgtaaagtgatggtggtcgtggtgccggaacacggcggcgcgctgaagggcgacagaatgcaggtatctggcctacgtgatatccctagcccgtctatcaccgacgtccccgttggggtgaaattcttcggcatgaaggcaccgcatcagggggcaccgattgtcatcgaacaaccgagcagcttcctggctatctccgatctggtggttcgcgttctcgatggcaagattttcaccgaagacaatgttgactggaaaaaactcaccagtgggttgccacaaacagcaccggtctccgagaacagtaatgcagtagttattcaataccaggataaaccgtacgttcgcctgaacggcggcgactgggtgccttacccgcagtaagaacgaaaaaggccgcagagtttcccccctgcggcctggtccgggcgcaaattgccattacggcagcctgacgcccgcatgacacgttacttccgcttgttcagccagttcacgatcatactggcaagaatgccagcaatgaccggagccgctaaatcatgccagaaggccatgcccagctctgcgaacgtcatatagccgcctgtgttgtaatgacaacgtttcgcggctattcttgagtggtctagagtcaagattagcccccgtggtgttgtcaggtgcatacctgcaacgtgcgggggttttctctctccagcaaccaatgccaccagggataaagcccccgcaacattgcgcctcaccggaacctttccggcttgccgctgattctacgattgctttttactgtcagcacccggcaatcttcctcattgcgcgatgccttccagcttaatttctttatttgcaatagttgcagttcatatccgggctgactccagactggtagtgaaatgcgcaattttgtagaattgcgcctcctcgcgacctccccagtgaatctgttgcctcattttttacatactgcgtattcgacttctccacctgttgcgcaagagaaactgggtttattcatttttgcgaggccgacttctttctggacaggactttatgcagcacaacacactaagcaaacacaatcagaaattgccgtttacacgctacgacttcggctgggttttattatgcataggcatggcgattggtgccggaaccgtgctgatgccagtacaaattggcttgaagggaatttgggtatttattaccgcagcgatcattgcttatcctgccacctgggtagtgcaggacatttatttaaaaaccctttctgaaagcgattcctgtaatgactacaccgatattatcagtcattacctggggaagaactggggaattttcctcggggttatctactttttgatgattatccacgggatttttatctactctctctccgtggttttcgacagcgccagctacctgaaaaccttcggtttaaccgatgccgatcttagtcaatctctactttataaagtcgctattttcgccgtactggtggcgattgcgtctggtggtgaacgattactgtttaagatttccgggccaatggtggtggtcaaagtagggattattgtcgtgttcggttttgcgatgatcccgcactggaatttcgccaatataaccgccttcccgcaagcctccgtctttttccgcgatgtcttgcttaccattccattttgcttcttttctgcagtatttattcaggtacttaacccaatgaatattgcctatcgtaaacgggaagcggataaagtactggcaacccggctcgcgctgcgtacccaccgaattagttatatcacgctcatcgcggtgatcctgttttttgcctttagctttaccttcagtattagccacgaagaagccgtttctgcctttgaacaaaatatcagtgcactggcgctggccgcgcaggtgatccctgggcatatcattcatatcacctctacggtgcttaatatctttgccgtactgaccgcattctttggcatttatctcggtttccacgaggccattaaaggcattattctcaatctgttaagccgaattattgataccaagaaaattaacagtcgcgtgctgactctggcgatctgcgcttttatcgtcattacgttgacgatttgggttagctttcgtgtaagcgtgctggtgttctttcagttgggaagcccgttatatggtattgtgagctgcctcattccgtttttcctgatctataaagtcgcacaactggaaaaacttcgcggatttaaagcctggctgattctgctgtacggcattttgctatgcttgagcccactgttgaagctgattgagtaaaccggagcgcatggccccggttttgtgagttaacgctgcggattttcatcctgatcaacagcaaaacaagctaccagttgaccgccgtagtcttttagctgcggctgcaactgggtgcaggggccgaagcgccgacgacagcgggcgttgaaggcgcaacccggcggtggattcagtgggcttggtagttcaccgctgagcttgatgcgctcgcggcgatcgtccgggttcaggcgcggcgtcgcggaaagtagcgcctgagtgtacggatggcgcgggttattgaagatttggtctttcgttcccttctccacgcagcggcccaggtacatcaccatcacttcatcagcaatgtgctccaccacgctcaggtcgtgggagataaagacataagacagccccaactcctgctgcaaatccatcatcagattcagcacctgcgcgcgcacactaacatccagcgcggaaaccggttcatcggcaatcaccacatccgggtcgagcatcagaccacgggcgatggcgatacgctgacgctgaccgccggagaacatatgcggatagcggtcatagtgctcggttttcaggccgactttcgccatcatgctcagggctttttcccgacgctgttctttgcttaagctggtgttgatcagcagcggctcttcaagaatttgcccgacttttttacgcggattcaggctaccgtaagggttctggaagacgatctggattttctgccgacgcagcttctgcgcctgcggatcgtgcttaagcagatcctgcccctggtaatacagctcgccaccggtgggcatttcaatcatcgtcagcaaccgaccgagggtgcttttaccgcagccagattcgcccactactgccagcgttttgccacgttcaaggttaaagctaacgccatccagcgctttaaccagacgttccggcgcgaacatgcctttcttcaccggataatgttttttcaggtcgatagcctgcaacagcggttgttgcagggtggcctcttgcgtactcatagtgtcggcctcccggcatcatcaagtgggtaatggcatttggactgacgcccgtcagcgagcatattcagcgccggttcttcagcgcgacatctgtcagtggcataggggcagcgcgggttaagcaggcagccgttcgggcggtcgtacttgccgggaacgacacctggcaagctcgccagacgttctttgtcctgagcaaattctggcagcgcacgcagcaatgcctgagtatacgggtgacgcggcgcatggaagatggcgtgcgcatcaccggtttccaccacctggcctgcatacatcacgatgattttatgtgccgcttccgccaccagcgccaggtcatgggtaattaacaccagcgccatgttctctttctgctgtagctccagcagtagttcgatgatttgcgcctgaatggtcacgtccagcgcggtggtcggttcatcggcaatcagcagttttggccgacaggcaatcgccatggcgatcatcacgcgctggctcatgccgccggaaagctgatgcgggtaaacatccagacggcttgccggatcgggaataccgacctgattcagcaggtcaatcgctcgctgacggcgggtacttttgttgccgccctgatgcaccttaatcgcttccataatctggaaacccacggtgtagcacgggttaaggctggtcatcgggtcctggaagatcatcgccacttcggcacccaccaggttgcggcgctctttttcactgatacgctgcaaatcctggccgttaaactccagtttttctgccattacgcggcccggataatcaatcagccccataatcgccagactactgacgctcttaccggagccggactcacccacaatcccgaccacttcgccctgttttacgctgtagctgatgcggtctacggcgcggaacggcgcgctttcgtcgccgaaatgcacgcttaatttatctacatttaataacgccatctcgaacctcttactgcttcagtttgggatcgagcgcgtcacgcagaccgtcacccatcaggttaaatgccagcaccgtcagcaggatcgccagacccgggaaggtcacgacccaccaggcgctttgcgcgaactgcaacacgtcggagagcatggtgccccactcaggcgttggcggctgtgcccccatgccgaggaaaccaagagcagccatatcgagaatggcgttagagaaaccgaggctcgcctgaacaatcagcggcgcaaggcagttcgggaagatgttaataaacatctgacgcatcgccccggcacccgccacgcgagacgcggtgacgtaatcgcggttaacttccaccagcacggcggcgcgggttaagcgcacatagtgcggcaaggcaacgaaggtcagtgccagcgcggcgttaccaatgctcgggccgaaaattgccaccagcaccagcgccagcagcagacttggcagcgccagcatgatatcgaccacgcgcataatgatgttatcgaccaggccgccaaagtaaccggcgatcaggccgagaataacgcccataatcaggcttaacacaattaccagacagccaaccagcaggctcaggcgcgcaccgtacatcaggcggctcagcacatcacggcctacgtcatcggtgcccagcaagtgcgccatgctgccgccttcctgccaggctggcggggcgagcagtgcatcgcggaactgttccgccgggttatagggtgcaatccagttggcaaagatcgcgatgaacagcacgatgacgacgtaaaccagcccgacgaccgcgcctttgttgcgtttaaaatagtgccagaactcctgtaacggggtcatcggcaccggtgcgctaatcactttattttcagtaacctgactcatgatgtccccttacttcttatgacgaatacgcgggttcaccacgccgtacagcagatcgaccagcaagttgacgaggataatcatcgtcgccaccagcaatacgccgccctgcactaccggatagtcgcggcgttgcagtgcgtcaatcaaccagcgtcccagaccgggccagctgaagatggtttcggtcagaatcgcccccgccagcaatgttcccacctgcaggccgataacggtcaccaccggcagcatcgcgttacgcagcgcatggacgataatcacccgcatgcgggttagccctttggcgcgcgcggtgcggatgtaatcctcgcccagcacttccagcatgctggagcgtgtcatacgcacaatgaccgccagcggaatagtacccagcacaatggcaggcaagatcatatgggcgacggcatcgataaagttgccgtcttcaccccagatggcggtgtcgattagcataaaaccggttaacggattggagtcatcgaggaacaccatatcgctcacgcgaccggagacgggcgtcaggttccagtgcacgctaaccagcatgatcagcatcatgccccaccagaagataggcatactataacctgtcagcgccaggccaaccgctgtgtgatcgaaaatggaaccgcgtttaaccgcagccagcacgccgaccggaataccgactgccgtagcaaaaatcatcgcgcagacgccaagttccagcgtggcctggaagcgcggcacgaactcttcccaaaccgggatgcggcttttcatactaatgcctagatcgccatgcataacgccccaaatgtaatggagatactgctgccacatcggtttatctaagccgagttcagccagcagctgcgcgtgacgctctggggagatcccacgttcgcccgccatgatcatcaccggatcgcccgggatcatgtggacaaaggcaaatgtgagaagggtaataccgataaacgtggggatgacgagtcccaaacgtcggagaataaactgcaacataacccggattctctatagtgacccgcagcctggaactgcgtgtctgtattgctcacaaatcaattcccgcccttatcggacagggaatgaagtattgctgccggatggcgctgcacgcagaggcacagcgccaccgggtatacagattgttgacaaagtgcgctttgtttatgccggatgcggcgttaacgccttatccggcctacaaaatcgtgcaaattcaatacattgcagaattttcgtaggcctgataagcggagcgcatcaggcatttttgcctttgccatcagtcttgtatggcttttaattattcgatagagacgttttcgaagtgatgtttgcctaatggatcaaccacatagcctttaacttctttacgtaccggttcaaacacggtggagtgagcgatgatcagtgccggagcctgatcgtgcatcaccacctgcgcttgtttgtacagttcaacgcgtttattgtggtcgtcggtagcacgcgccggttgaatcagatcttcaaacggtttgtagcaccatttactgtagttggagccttgttcagaggcggcgcagctgaacaggatggcgaagaagttatccggatccccgttatcgccagtccagcccatcattaccgtctggtgctcgccatctttcgcacgcttgaggtactcaccccattcgtaggtgacaattttggcctgcacgccgactttcgcccagtctgcctgaatcatctccgccatgcggcgagcgttcgggttatacggacgttgtaccggcatcgcccacaggtcgatggagaaacctttttccagacccgcttctttcagcaaggctttcgctttttcaggatcgtaggtgtagtcctgaacgtcgtcgttatagccccacatggttggcgggatcaggtttttcgcacttacgcccgcgccctgataaaccgctttgatgatcgcgtctttgttcaccgcgtaggtcagagcctggcgaactttcacgtcatcgagtggttttttctgcacgttatagctgagataaccgacgttcagccccggcatttccatcagattgatggatttatcctgcttcatgcgagcgatatctgccgggttcgggtacggcatcacctggcattcattcttctgcaatttcgcgtaacgcacggaagcgtcaggggtaatagagaaaaccagcgtatcgatctgcggtttggtgccccagtagccatcaaacgctttgtagcggatacgggaatctttttgatactgctgtaactggaacggaccggttccgattgggttgaggtccagtttttccggtgtaccggctttcatcatcgcatcagcatattctttactcagaatagaggcgaagtccattgccaggtcagcgaggaacggcgcttccgggcgagtcagcacaaactgaacggtgttgtcgtccacctttttcacttcactgatcagctctggcaagcccatgccttcgaagtattcgtagctgccgccagaaactttatggtacgggttttgcgcgtttttctgacgatcgaagctgaacaccacatcatcggcgttcagttcacgcgtcggtttgaattctttattgtcgtgccacttcacacctttacgcagatggaaggtataggttttaccgtcttcgctgacttcccacttttcagcgaggcccgggatcacttcggtggtgccgattttaaattcaaccagacggttataaagcgggacggaagaggcgtcataggtggtgccggaggtaaacagctgcgggttaaacccttccggagatccttcactgcaataaaccagagttttagcctgaacacttgctgcgacggtcatagccaccaggctgagaccaagcttcagcatcccactctttttcaaggaaatacgcattattctgctccaattgtgatgtttgttgttttaaccctttgcagtgggttgtcgctgcctgaccttttttgttttttgcccggtcgggtcaacgttatgaggtggggatgccgtactaattaacatcagtgtaacagtgcggatcctccataaaatgcccctcgtgacctacaatctgtcaacagaatgtgaaaacgtcaatacagccaaccgggatttacaccaacggtgagaatccacacacaaagattaaaaaaacttcaaacagctatttgcagcagagaaatttgtgctactccaacatgaccagaacaatcagcttaatatttagcaacatttggtgattaagttttatgcatttaatgaaaaaaatctgaggaaaaggtggatatctgagcgattaataccatgaacgctaaaacgcacagcggaaaatgccagggccagccataagtaacgcaaaaaaagatttaagcaaatataaaaaaagacaatggtttctgtcacaaatccgttaatggatagtgagatatggggcgcaaatttggcagggaaatgtgtgtcgtgtaggtcgaataaggcggtcgcgccgcatccgacaatggccggcacatttgcctgatgcgacgctgacgcgtcttatcaggcctacgtcgagtcgaacctccctgcccccggaggttctcatcctcatgagctgcagatgcaaaaaagcctgctcgttgagcaggcttttcgaatttggtcggtgatagaggattactcgccacttcgtggctcgccctgcgggccgttgctggcgcaacgttctctcgcttcgctcgagtcgaacctccctgcccccggaggttctcatcctcatgagctgcagatgcaaaaaagcctgctcgttgagcaggcttttcgaatttggtcggtgatagaggattcgaacctccgaccccttcgtcccgaacgaagtgcgctaccaggctgcgccaatcaccgaatgcggggcgcatcttactgcgcagatacgccctcgtcaatcccttaatagcaaaatgccttttgatcggcgagaaagtcagcaggccgcttagttagccgctgcctcttttgcctgcgggatgtgacaccagttgttgttttcgttaattccaccatccggactagtatagccaagacaacccatgatggtatcgtacagctctacgtgacggcgtggcactttcatgtcggcttcttttttcagctgcgcaaacgcctgcgcattggccggattttccagatatttatcactcatccagaccatcatcggtacgcggaactgctccggcggtgccagttcacgcggcgtgccgtgcaggtgctcgcgttcattaatactctcaccgtggtcagctgcgtagaacacaatcgctttcttatcgcgaacctgatcaatcacgctggagataaagtgatccacataggtcacgctgttgtcataggagttgatcatctgcgctttggtacagccgctatcaacaccaatacattccggcttccactgcgcgaagctacgcggataacgctgggtgtagttaaaatggctacctttggtatgcagaatgatcagatgcttaccatccgggttgcgccctaggctttgctgcatttcgtctaccagcaacatatcatctaccggcttgccacgattacgtggctccgcaccaatctgctcacgataagcaatgttgtccgccatcgtgttgctgtagaaccacatttcgctctgcatagcgtagaggtcagaactgaatcctaactgcttcagaaccgcgaaaatgttctgttcttttaatgtgcgctgcggattatcttccgcgcccccctgacgtacaaacatgcaacgcagactgagtttggttgcggtatcacaggagtaaccacggaacgccgccagatttttctcctgggccagtttcggcgtggtattacgctcatagccgaaaatacccatatggtcccaacgcgtggtttcaccgatgataaacacgacataagtgtcatcaacgttttgcggtgcctgataagtgaatttcttcgccggattaagcaaactattattatcggaagattcatcgacccgcgcccaggcatacagccccaacgcagaaagccagttacttggcagataagagttcgctacgacaccgccataactcggcaaatcaacgccggtcgccctctccactttcttctgctggatatccagcaaacgaatcggtgcccaaaccataatacccgccagtacgacgaccgccaggctgcgaatacgctgccctggggttcgcagttgtcggagcaaggtgtagcgacagcggttattccagataaggataagaggcaatgcactaacggcgattaaccagagaataaagttcagaccaacaacttctttactcaggtcgatatcggtggtcatgacggaagcgatgatgccataaccaatgaccacattaaggaaggtcatgtaatagctggcacctgcggaaaagagcaccaccaggcttgccagaatacgccagctgcggcggccaaacaggctaagaagacgtagtaaaaagaaggtcaccagtacggtggcggccagttcaacaacagcagaaatgcctttccagacggtaaaatcgtgcgcatagctgccgaagcggcggtaaaaaaccgcgccattcataaaaaggccaatatagattgcaagcaaaaagctcagcttctgctgtgtaatgcttttgatgtatctcatgcaaacaaaccctggacaaacaggtgataacaccctgcttagtggcttttcaggcccggcagggaaaaagtgcggaggtagtcagataagtaaaatctacacgcgcgaataagtagaccacagcaaagggaaaaagtgtggggaaagagtgtgcatgaagcacaaatttacaaaaatgcaagtttgaaaagagactttagcgttacaaaaagcagtaaaaagggccagttaattggcccaaattttacgagtcattgtttatacatttcgttgatgcgtttgatgcacacggaagctgaagcccagtagctcgcggctgagcattaaagggagccatgcgcctcacgcaacattttctgctctggctgacgaatcgtcgtagaaagcgccaaactcagaatcagcagggcgaaaatcacgtagaaggtcacatagaagccgccaaacagactggcgataatgctaccacaaatgctaccgataccgaaaccgagataaatcacaccgtagtttttcgccaggttattgaggccaaagaactcactgaccagactcggaaagacggtaatagtgccgccaaagttaaatgccacgcaggcaatcgctgcaaagaacgtcactgcattcaatggtgcaaacagcagggccgccatacccaccaggcttatcacctgaccaatggtaataacacggatacgggcgattttgtcagacagaatacccagcaccagacgaccactaaggttggcgatggaaataacagtgactgcattggctgcggaaaccacatcaaggtgtgccagactttgggcgatatctttcgctaccccaatcacgtacaggccgctcatgcaggcggtcaggaacattaccgctaacatccagtactgcggtttacgcatgctctctgccagcgtgtaatctttctccaccacaccattgctggttttcacttcctgttttggtgcgtctttcattaacgttgcgccgaaaacaatcatcaacagcgcaatcgctccccaaatcacaaaggttttttccagaccgaccgtttccagcagctgcgtgtcgataaatttgaaacccaggctacccagaccataagaaccgatagcgaacgcggagatcagacctttacgctccgggaaccacttcacacagttagagagcgtcagcagataacccgcgccatctgccagtcccaccagcacaccggcgcttaaccacagcatcatcaggttgtcagaatgcgctgtcaggaagaagcctaatcccagcaaaatgccggaagccatggtgacgcgtttaacgccaaaacgttcctgtaatttgcccgcaacagaagagctaattgccagccccagacttaacaagccgaaagagaaagcgacctggcttaccggcgcatccagcttggcggaaagcgcgccattaaacaggctccaggtataaacgctccccagcgcaaactgggtaatgatagtaccgatgagtgtcagccagcgggtacgctgataattactaggtgtcatggcagtattcctgcagtaataaaaaggaaaaatctctgccgacaaccataacgaagtgcactttatgcctggggaaaaacggcatgaaatgccatcagaacggaatgaaatgccttagttcaggaatgaatgacgcgacaattattcaccaaatttattatttggtaagttagcacccactatcgccacaactattgttatttaatggtttcaattgtgactgttacgttaaaatctggcgctaacccccatcgtatacagatagtcgctattattagtggtattttctgcctgagttagcgcggcataggcggcaatattttgattgagcaacatatcagcgcctacggtgacatccagccagttgccgttctggtttgtcgccgtcatccggctcaggccactttgcgccttccagatattctcgccaaattgctggttatagctgatttgcgcccagggtcggagatcgccaagccgggagtcaacacgccagcctaaggtactcacgctggcatgccataacggatcggtcagcgtggtagtactgtcgccaaactcgttatacatgctggtggttgtgccatcgtaatgtaatgccgcgaccgggccggttgtaacctgttcatataaaggaaaattccagcccatactcatactgctggtcacatccacaggggtttcttccgccagattgacttccagtcccagcgccctttggctactttgaatacgttggctcaaaatatcgttgtaatcaggttgatgatcactatcccaggtgtaacgctctgtggaaagtccgggttgcgtatcaacgatatattcttgttgccaggcgtaagctgtgttgagaaaaaaggcactgattaccacgctcgccagcaggcttagctgccagcgaccaccgcttttttttatgatcattaacacgactccagggaagagccgaattcggcaatattattgtcattgtatgaaggatatcgggcatagtagccctgtattaaatattgactttttcaccgatgcgtcaagaaaagcggctgaaatttttacgatcgggtacatagcgagggaaagtatggaacgttgcggctgggtgagtcaggacccgctttatattgcctaccatgataatgagtggggcgtgcctgaaactgacagtaaaaaactgttcgaaatgatctgccttgaagggcagcaggctggattaagctggatcaccgtcctcaaaaaacgcgaaaactatcgcgcctgctttcatcagttcgatccggtgaaggtcgcagcaatgcaggaagaggatgtcgaaagactggtacaggacgccgggattatccgccatcgagggaaaattcaggcaattattggtaatgcgcgggcgtacctgcaaatggaacagaacggcgaaccgtttgtcgactttgtctggagctttgtaaatcatcagccacaggtgacacaagccacaacgttgagcgaaattcccacatctacgtccgcctccgacgccctatctaaggcactgaaaaaacgtggttttaagtttgtcggcaccacaatctgttactcctttatgcaggcatgtgggctggtgaatgatcatgtggttggctgctgttgctatccgggaaataaaccatgattcgggaagcgcaacgtagtgaactccccgcgatcctcgaactgtggctggaaagtacaacctgggggcatccctttataaaagcgaattactggcgtgactgcattccgctggtgcgggatgcctatcttgccaacgcgcaaaactgggtctgggaagaagacggtaagcttctcggttttgtcagcattatggaaggccgatttctggcagcgatgtttgtcgcaccgaaggccgtcaggcgcggtattggtaaggcgctgatgcagtatgtgcagcagcgccatccccacctgatgctggaggtttatcaaaaaaatcaaccggcgataaatttttaccaggcacagggttttcacattgtcgattgcgcatggcaggatgaaacccaactacccacatggattatgagctggccggtggttcaaacgctgtaattaactgctggccggtggttcaaacgctgtaagtgtcagttccggaccgttgtatttttccagccatgccagcgccgtattacccgcacagccattccccagccggctgctggggagatctttggtcagcacgttcactgcgccgtttttacaaataccgtcagcggttaaatccagatccggccatgccccttcgtgaatgcaaatcacgccaggtttaattccctcgctaatgaccgctccggcaagaatttgcccgcgtgcgttccacaaccgaacagtatcgccatcttgtatgccgcgctcctgggcatcgtcaggatgaatggtgacaggctcacgatttgccaccgcgtacaattcgcgcagagaactgtaattcagctggctgtgcaggcggtgcgccggatgggcagaaagtacctgcaactgttctggttcggcattgccctgccattcgtccggctccagccacattggatgcccagggcaatccgggtaaccgtaatcggcaatacgctgactgaagatttcaatcttgccgctggcggtttttaacggatgcgccagcggatcgcggcaaaaatcagcgaagcgaataaaccgctcgctgtccgggttttccggcatctcaattaactggttggcttgccagaactcagcaaatggcggcaattcaacctgctggcttgccccgcgctgtcgggcaacgttataaaacgtttccagccattgcagctcactttttccttccgtaaaacgtgcataaccgcccttctcccagcgttcacttaactcggcaaaaacatcaaaatcattacgcgcttcatagcgtggcggcaccacttgcttcatcggcaccagatgctgattactgtaatcaccggtcatggtgagatcattacgctcaaaagaggtagtcgcaggcagaacgatatccgcgtgttttgccgccgccgtccagaagcattcagagatcaccaccagctccggtttttgccaggcacggatcaggcgattggtatcctgatgatgagtaaagttggcaccgcccgcccaccagataaaacgaatatccgggaaatgtcggttcataccgttgtgttgatatgcgccaccagggttttccagtgcttcaacaatgcgggcaacagggattttatccaccgcatcgcagccacccggcaagctgccctgcatggaagagagcaccgcagaacgccgcgtggggttaccaccattggcaaaatggtaagaaagaccaaaaccgccgccgggtgtgccgatttgccccaacattgctgccagcgtgacgatcatccagtgtttttgctcaccaaactgttggcgctgcattccccagcctgccatcagcatggtggtattttggtggaaaatagccgccagctcgcggattttcgctgcgccaacaccacaaatctctgctgcccattcggcggttttcgctattccgtcactctcgcccagcaaataagaggcgaagacggcataacctgtggtgcaacgcgccagaaacgcttcgtcgtgccaaccattttccaccagcgtatgggcgatccccagcatcagcgcaacatcggtgcccatgtgcggtgccacccactccattttatcgccaaagaaatcgacggtttcgcttcgcattggatcaatgcagatcagctttttcccgctgtcacgcagtgcagaaaagtaagaaagcccctgctcatcggatgcattccacgcaattttcagcgtattgagtgggttagcactccacagcaccacgacatcgctatgttccagcaccagcggccaactggtctgctgttgataaacttcactaccacccacgacatacggcatgatcgcctgtgccgcgccggtgctataatcccccagatgcccggtataaccgcctgccagcgccatatagcgttgtaataatgtgctggccttatgcagcacgccgttactacgccagccgtaggaaccagcaaaaatgcttgccggaccataagcctcacgaatgcgtttatgttgttggtgaataagatccagcgcctcatcccaactcacgcgaacaaattcatcctgcccacgaatgccttgcgggttttccggactcgcaagaaagccttttcgcaccattggaaatcgtacccgcgtattgctgtgaacctggtcgcgaaccgcgctctgcaaggagttttccattcctgtggctaacgcgccacggctgctaaacacggtttcgccgtcggtttcaaccagcatgggcccccaatgggcggcagtcagaacggaatatcgtgaggatgagttggccaaaccgaagactcctgaaaggttagatgtattgagcagttaaatattacttacaaatttccgagtattcccaggaataatcttcatgttcacgcggcataatctcccgccacggaacccgtggcaaagaataaaaaggttattaaggattaacaatgaagaaacgtgtttatcttattgccgccgtagtgagtggcgctctggcggtatctggctgcacaactaacccttacaccggcgaacgcgaagcaggtaaatctgctatcggcgcaggtctgggctctctcgtgggcgcgggtattggtgcgctctcttctagcaagaaagatcgcggtaaaggcgcgctgattggcgcagcagcaggcgcagctctgggcggcggcgttggttattacatggatgtgcaggaagcgaagctgcgcgacaaaatgcgcggcactggtgttagcgtaacccgcagcggggataacattatcctcaatatgccgaacaatgtgaccttcgacagcagcagcgcgaccctgaaaccggcgggcgctaacaccctgaccggcgtggcaatggtactgaaagagtatccgaaaacggcggttaacgtgattggttataccgacagcacgggtggtcacgacctgaacatgcgtctctcccagcaacgtgcggattccgttgccagcgcgttgatcacccagggcgtggacgccagccgcatccgtactcagggccttggcccggctaacccaatcgccagcaacagcaccgcagaaggtaaggcgcaaaaccgccgtgtagaaattaccttaagcccgctgtaatccctttcatgccaggtgatgcagaaatcacctggcattcttcagttttccttcatcatatttcaggctaaggtgatcgccttatcagtgaatggagagaagcatgaagccgtccgttatcctctacaaagccttacctgatgatttactgcaacgcctgcaagagcatttcaccgttcaccaggtggcaaacctcagcccacaaaccgtcgaacaaaatgcagcaatttttgccgaagctgaaggtttactgggtagtaacgagaatgtaaatgccgcattgctggaaaaaatgccgaaactgcgtgccacaagtacgatctccgtcggctatgacaattttgatgtcgatgcgcttaccgcccgaaaaattctgctgatgcacacgccaaccgtattaacagaaaccgtcgccgatacgctgatggcgctggtgttgtctaccgctcgtcgggttgtggaggtagcagaacgggtaaaagcaggcgaatggaccgcgagcataggcccggactggtacggcactgacgttcaccataaaacactgggcattgtcgggatgggacggatcggcatggcgctggcacaacgtgcgcactttggcttcaacatgcccatcctctataacgcgcgccgccaccataaagaagcagaagaacgcttcaacgcccgctactgcgatttggatactctgttacaagagagtgatttcgtttgcctgatcctgccgttaactgatgagacgcatcatctgtttggcgcagaacaattcgccaaaatgaaatcctccgccattttcattaatgccggatgtggcccggtggttgacgaaaatgcactgatcgcagcattgcagaaaggcgaaattcacgctgccgggctggatgtcttcgaacaagagccactgtccgtagatagcccgttgctcagtatggccaacgtcgtcgcagtaccgcatattggatctgccacccatgagacgcgttatggcatggccgcctgtgccgtggataatttgattgatgcgttacaaggaaaggttgagaagaactgtgtgaatccgcacgtcgcggactaagccgcgactgcgtagagtaaagcccgataatcgctcgggcttttactctttattgggttgcagtaactgctgtagtccaggcctgattaaacgcctgatgctgtgccggtaatggcgcaatcagtttgttatattcacttgcctgctgactagtcgggaactggatgccatttgcgacaaagctcacctgagtaccttgctgagcaatgtagtctccaaccatcaccagttgttgcgtgaaagtttgtgccgccggaatcaacggttgcaatgcatcagctggcgtcgttaccactttggtgaatgcctgatcaaagaccggtttcaaatcatcgctctgttttagcgcagagtgcgcagcatcggcctgcaacttcgcattttgcagttgttgcgccagcacacccaggctaccgttcatttcacgcagcggaccgctttgcgtaacgtaatcctgcggtacgcgaattgcgttaacgctgtctacaaccgggcgcagaccggaatccatcgcctgattcacctgctgagaataaccatacagaatcgcgtaatcagagacaaaaggaccaaactgttttttctgatcggcagtcagggttggtagacgttcaccgctacgcatcactgtattctgcaggaagtcgataaacgctttacgctgatcgccttctttatcaaaacacccactcaggctaactaccattaataacgccgcaagaggcgcaaaccagcgagagcaggactttcctgtcgccattttcttactcctttcacccaaaaaaagcgcacaacgacacacgcgtgtctgacgtgacaaggatagtccaggacaggcttgcaggataccctttctacgtaatcttcctggtaaaatcatggagaaaatgaaacaaggttaatttgttgtttcattgttaaaaaatgatagtgccgttgccttttttgtagccagagatttacgccttcgcagaaggttagattttcgaaatctttacaaaacaggagtggtaagagatatatcggcatttatcagatcgttaggtggctataagtcacgctaaatgacaggctgaatcgaatcatagccagagcatgccctgacttcaccccgctgtgtctgcttttcccgactattcttaatgagcttcgatgcaattcacgatcccgcagtgtgatttgaggagttttcaatggaatataaagatccaatgcatgagctgttgagcagcctggaacagattgtttttaaagatgaaacgcagaaaattaccctgacgcacagaacaacgtcctgtaccgaaattgagcagttacgaaaagggacaggattaaaaatcgatgatttcgcccgggttttgggcgtaagtgtcgccatggtaaaggaatgggaatccagacgcgtgaagcctagtagtgccgaactaaaattgatgcgtttgattcaagccaacccggcattaagtaagcagttgatggaataaacttttatccactttattgctgtttacggtcctgatgacaggaccgttttccaaccgattaatcataaatatgaaaaataattgttgcatcacccgccaatgcgtggcttaatgcacatcaacggtttgacgtacagaccattaaagcagtgtagtaaggcaagtcccttcaagagttatcgttgatacccctcgtagtgcacattcctttaacgcttcaaaatctgtaaagcacgccatatcgccgaaaggcacacttaattattaaaggtaatacactatgtccggtaaaatgactggtatcgtaaaatggttcaacgctgacaaaggcttcggcttcatcactcctgacgatggctctaaagatgtgttcgtacacttctctgctatccagaacgatggttacaaatctctggacgaaggtcagaaagtgtccttcaccatcgaaagcggcgctaaaggcccggcagctggtaacgtaaccagcctgtaatctctgcttaaaagcacagaatctaagatccctgccatttggcggggatttttttatttgttttcaggaaataaataatcgatcgcgtaataaaatctattattatttttgtgaagaataaatttgggtgcaatgagaatgcgcaacgccgtaagtaaggcgggaataatttcccgccgaagactcttactctttcaatttgcaggctaaaaacgccgccagctcataactctcctgtttaatatgcaattcacacagtgaatctcttatcatccgggtgaaaaataaaagcgtgaaacaaatcactattaaagaaagtaatctatatttctgcgcattcccagcctcctgtgttgatttccaacgagtataactttgatttatagtcaggtggggcttttctctgtctgcctttcggtgaatacctgagacaaacagtctcaagcacccgtggctattctagcttaataagtttgtttcttctccttgatataatcctaaaaaaatctcataaaattaatatatgagataatctttattcagcagaagattattaaaggttgctgtattatttagcgataaaaaaagcctgccagatggcaggctatttaataacggcgttattattgcaacaggctaatatccgcaacgcgcaggaacagttcgcgcagtttctccagcatggtcagacggttgatacgcaattctttgtcatcaaccatgaccatcactttatcgaagaaagcatcaaccggttcacgcagctcagccagttcgaccagcgcatcctggtaacgaccttccgtaaagtacggctccagcttgtcacgtagcaccacaacctgcatcgccagtttaatttcttccggctctttcagggtagaggcattcacgcggtcgctcagcacttcgtcagatttcgccagaatgttagatacacgtttgttcgccgccgccagtgcagcagctgcatccagggtacggaaatggcttaccgctttcatacgggcatcgaaatcagccggacgagtcggacgacgcgccagtaccgcctggatggtgtcaacggtataaccttcgtcctgataccaggcgcggaagcgaccgagcataaagtcgataacatcatcaactacgttggcattagtcagcttatcgccatacagacgcaccgcttcttcggtcagcgtttgcagatcaaggttgaggttcttctcaacgataattcgcagcacgccaagcgcggcacgacgcagcgcaaacgggtctttgtcgcctttcggatgctgaccgataccgaagatacccgccagggtatccatcttgtcagcaatcgccagcgcacaagctactgggttggacggcaggtcatcaccagcaaaacgcggctgatactgctcattcagcgccaccgcgacatcttccgcttcgccatcgtgacgcgcatagtgcatccccataacgccctgggtgtcggtgaactcgaagaccatgttggtcatcaggtcgcacttagacagcagacccgcacgggtagcgtggttaacgtcagcgccaatctgttcagcaatccagccagccagcgcctggatgcggtcagttttgtcgcgcagcgtccccaactgttgctggaacaacacggtttgcaggcgcggcaggttatcttcaagacgttttttacggtcggtgttgaagaagaactcggcatccgccagacgcggacgaacgactttctcgttaccggagataatctgctgcggatctttgctttcgatgttggcaacgaagataaagttcggcagcagtttgccgtcgttcgcatacaccgggaagtatttctggtcacctttcatggtgtaaaccagcgcttcagccggcaccgcgaggaatttctcttcgaattttgcggtcagaacgaccggccactccaccaggctagccacttcttccagcaggctttcgcttaagtcagcgttaccgccaatcttacgcgctgcttcttcggcatcggctttaatcttcgccttacgttcttcgtaatcggcgatgactttcccacgctcacgcagaatttccggatactgatcggcgttatcgatggtgaattccggctcgcccataaagcggtggccgcgaatcacgcgatcggactgaatgcccagaatggttgccggaatgactttgtcgcccagcagcagggtcacggtgtgcaccggacgcacgaagtgcacgtcgcttgcgccccaacgcatcagtttcgggatcggcagtttcgccagagaagtcgcaaccatattcggcagcagtgcttcggtgctttcgcccttcacatgggcgcgatacagcagccattcgcctttatcggtagtcagacgctcagcctggtcaacggtaataccgcaaccacgcgcccaaccttctgccgctttgctcggtttgccttcagcgtcgaacgcctgggcaatcgccgggccgcgtttttcgatttcacgatccggttgcgcttccgccaggttagctactttcagcgccagacgacgcggagcagcaaaccattgaacggtgccgtgtgcgaggccagcgctatccagctccgcagtaaagttcgcagcaaaggactcagccaggctgcgcagtgcttttggtggcagctcttcagtgccgatttccaccagaaaagttttctcagacatagccgcctcttacttatctttgttgcacatcgggaagccgagggcttcacgggaagcgtagtatgcttctgccactgctttggtcagggtgcgaatgcgcagaatgtagcgctgacgctcggtgacggagatggctttacgcgcatccagcaggttgaagctgtgggcggctttcagaatacgctcgtaggctggcagcggcagcggattttccagcgccagcagctgctgcgcttctttctcgtactgctcgaagcaggtgaacaggaagtccacatccgcgtattcgaagttgtaagtggactgctccacttcgttctgatggaacacgtcgccgtaggtggttttacccagcgggccgtcgctccagaccaggtcgtaaacgctgtctacgccctgaatgtacatggccagacgttccagaccgtaggtgatctcgccggtaaccggtttacactccagaccaccaacctgctggaagtaagtgaactgcgtcacttccatgccgttcagccacacttcccagcccagtccccaggcacccagcgtcgggttttcccagttatcttccacgaaacggatgtcgtgaatagtcgggtccatgcccagctctttcagagaaccgaggtacagctcctgaatattgtccgggcttggcttaatgaccacctggaactgatagtagtgctgtaaacggttggggttttcgccgtagcgaccatcggtcgggcgacgagaaggctgaacataagcagccgccatcggttctggccccagctcgcgcagacaggtcattgggtgagaggttcccgcgccgacttccatgtccaatggttgaacaatggtgcagccctggcgagcccagtaatcctgtaaggtcaggaacaagccctggaaggtcctggtatcaaacttttgcatattatttcgtgctggatacgtgtggatttaaaggaagggatcagtatacccgctggatggaagatatacagtacgaaacgggaaaaagcagggcttaacgcatggaaagatgcaaaaaatggccatccgcgtcaaaagaacagacaaactgctctttacggaaggtataaccgcgcatttcatagcttccctggaactgttcgaaggcggtgacgtcgattttttgctcgccggtgttataacgttttgccgcctgatccttgcataacgcttccatattcaagctacgcagaggatcaacctttacccgttgtgctttctgcacgggactcggtatagaacaacccactagcaccataagcgccattgccggaaagaaagcgttcatcatcattaaattaccgtctggtttgcaggtgagtcttattatttatatcggtatagtggctgatatcttacgaatttccttaagcctctataagctgtagtgataaaactcagattattccagtgcgccaaccaaatgatttatcggtcagactttttttaaccagatacagagacacagatgcagcccaaaatttactggattgataacctgcgagggatagcgtgtttaatggtggtgatgattcacaccactacctggtatgtgaccaatgctcatagtgttagccccgtcacatgggatatcgccaatgttctgaattctgcctctcgtgtcagcgtgccgctatttttcatgatttccggctatctcttttttggcgaacgcagcgcccagccgcgccatttcttgcgtatcggcttatgtctgattttttatagcgcaatcgcactgctctacattgcgctgtttacctccatcaatatggagttagcgctgaaaaacctgctgcaaaagccagtgttttaccacttgtggtttttcttcgcgattgcggtgatttatctggttagtccgctgattcaggtgaagaacgtcggcggaaaaatgttgctggtgctaatggcggtgattggcattatcgctaacccaaacacagtgccgcagaaaattgacggttttgaatggctgccaattaacttatatatcaatggcgatactttttactacattctgtatggcatgttgggccgcgctatagggatgatggacacacagcataaagcactgagctgggtgagcgccgcgctgtttgcgacgggggtttttattatctctcgcgggacattatatgaattgcagtggcgcggaaattttgccgatacctggtatctttactgtgggccgatggtttttatctgcgcaatcgcgctattgactctggttaaaaacacgctggatacgcgtaccattcgcggacttggcttaatctcccgccatagtttgggtatatacggattccacgccttgattatccatgcgctgcgcacccggggaattgagcttaaaaattggccaatactggatattatttggatcttttgcgcgacgttggcagcgagtttgttactttctatgctggtacaacgaatcgacagaaacagattagtgagttaagtaaaagcccggtcacattggactgaccgggcttacgtgagttattcgctgtattcttcctgggtaacctgtgtttcttttggtgggtttattccggcatcacgaatatttttctgcaccgctactgcaccaaacaagcttaagaagaaagccagtccataaaaacctttttcgctgagtaataatgtcgcattccacagacctaccatcagtaatgcaacagagataataaagacagtcaggcaggtcatataataaatggaagtggtcggtatgccttcatacttgtcccgaacggtcttttgataagacgccgcagaaaacagtcctaataccagtacggcaaaataatatcctttttcatttaactgcatctctgcattccatagccctaacagataggtaacgataccaccaacgagagctatccaactcacaatactaaaggccggactataggtacttattttgttgtccatcacagtattcctttcattcctgaatatgtaagagctttatgttgctcatgcgctgcgaaacaaacgcatttgaccaaacaagcagacaaaaaaggcgatgggatagatcaccatttcataagtattgataggtgcgtttaaaacaccgataaacaagagaccgatagtgattaacgcaactaactggcagatatgggtaaaaaaatcatccagttgcccgagtttttctgcgcgaagatatgcatagttgccaaaagttgctgtcattaacacgccaagaaaatagccttttccacttaacaatgggcaactgatccatagcccaaccagataaaccagcgccccgacaacaaataatagtttcgccacagtcttactggttttcataacgatctccatatctaccagcgatacattacgagtaaccaacgaaagacaaaactgaaaaatgccattaacaaatgattttcagaataaattcatactaaatattaattaattactgagatatatagatgtgaattatcccccacccggtcaggcaggggataacgtttacgccattaatggcagaagttgctgatagaggcgacggaacgtttctcgtcgtggctgataagcggcataacgctgcgcatctggtagatggctctgttctaacggtagttgcggcaacaattcaatgaggcttttctctggattcgccgcgatctgcgccagccttgctgcgcccagtgctggccccacatccccccccgtacggtaatcgagctgctgaccgctgatatccgccagcatctgacgccagtactcactacgcgccccgcccccaatcaacgtaacactttgcggtttaataccgcaggcatgcacgacatccatgccatctgccagcgcataacccacgccttccagcactgctcgcgccagttcattggggccatgttgatgagtcaaaccaaagaaaacccccttcgcctggggattattgtgtggcgtacgctcgccggaaagataaggcagaaaccaaactggctcggcactttcatcagcctgttgagctgcagcgattaaagctgggacattgctcaggccggttaatttcgcggcccaatccagacagctcgctgcactcagcatcacagacattaaatgccaacgttgcggtagcgcatggcaaaagctatgtacggcgctttctggcttgcttaagaacccttcgctgacagcaaaatagaccccgctcgtccccaggcttaacattgcctgattagcatcaaccattcccacaccaactgcaccagctgcattgtcgccaccgcctgcgacaactggcaccgtcgccataccccacgctttcgcaacttcaggtaacaaagcaccagtaatttcgctgccttcgtataatgcgggcatctggtcacgagataagtcgcaagcctgcagcatgacgtcactccagtcacgctttgcgacatccagccacatggtgccagctgcgtcagacatatcgctggcaaactcccccgtcatacgcagacgcaagtaatctttcggtaataatactttgtcgatttgacggaatatctccggctcatgccgctgaacccatagcaatttaggcgcagtaaatccgggcatcatcaggttgccggtaatcacccggctttgcggaactcgcgcttccagcaaagtgcactcttgcgcacagcgcccgtcgttccacaaaatggcagggcgtaacacccgttgctgagcatccagcaaggttgctccgtgcatctggccggcaatacccaatgctttaacgtcctgcagagaatgctgatcgcccagagctttcattgcgcgatcagttgcctgccaccactgttccgggtcttgttcgctccagagtggatgcgggcggctaacggtcagcttttccgtttgcgcagcaaccacctcaccctgctcgttgagcaaaataacttttacgccgctggtgccaagatctatcccgatatacatatcgatcgttccttaaaaaaatgcccggtatcgctaccgataaccgggccaacggactgcacagttagccgttatttgtcgaacagataatggtttaccagattttccagttgttcctggcgaccactctgatgcaccggagacaaatgatgttcctgagcatatttggctaaatctgccagactcatttggcctttcaggatttgctggcccaattcgctattccagccggaataacgctgcgcgatgcgtttatccagctcgccatcttcaatcatgcgcgctgcaattttcagcgccagtgccatcgtatccatcgcgccgatatgaccgtaaaacagatcatatttatcagtactttgacgacgtactttggcatcgaagttcagaccaccggtggtgaaaccgcctgctttgagaatttcatacatcaccagcgcattctcttccacactgttcgggaactggtcggtgtcccagcccagttgcgcatcgccacggttggcgtcgacagaaccgaacaggccaagcgcaatggcggtggctatttcatgatggaaagagtgacctgccagcgtcgcgtggttagcttcaatgttcagtttaatctctttttccagaccaaactgtttcaggaagccatagaccgtcgcggcatcgtaatcatattgatgtttggtcggttcttgcggtttcggttcgataagcaacgtgccctggaaaccgattttatgtttatgctcaaccaccatctgcataaagcggcccagttgttcacgctcctgacgcaagtcggtatttaacagcgtttcgtaaccttcacgaccgccccacaggacatagttttcaccgcccaatttatgggttgcttccatcgctgtaacaacttgcgttgccgcccagctgaagacttcaggatctgggttcgtcgccgcacccgcgccgtagcgagggtttgtaaagcagttggccgttccccacagcagcttcacgccgctctcttcttgcttgcctgccaggacatcaaccatttgcgcaaaattattgatgtactcttttaagctcgcgccctcaggggaaacatccacatcgtggaagcaataaaatggcacatgtaacttgtggaaaaactcaaatgcgacatctgctttacgcttcgccaacgccagtgcctcaccaggctgctgccacggacgattaaacgcccccacaccaaacatatccgccccgttccagcagaaggtgtgccagtagcaggcggcaaaacgcaagtgctcttccatacgcttacccaacaccagttcgtcgggattgtagtgacggaatgctaacgggttactggatttactgccttcataacgaacgcgatcgagctggtcaaaataggcttgcatattgaactccataatcaggtaatgccgcgggtgatggatgatgtcgtaatattgggcactccctttcagttgctcaattatgttatttcacactgctattgagataattcacaagtgtgcgctcgctcgcaaaataaaatggaatgatgaaactgggtaattcctcgaagagaaaaatgcaataagtacaattgcgcaacaaaagtaagatctcggtcataaatcaagaaataaaccaaaaatcgtaatcgaaagataaaaatctgtaattgttttcccctgtttagttgctaaaaattggttacgtttatcgcggtgattgttacttattaaaactgtcctctaactacagaaggccctacaccatgaaaataaagaacattctactcaccctttgcaccagtctcctgcttaccaacgttgctgcacacgccaaagaagtcaaaataggtatggcgattgatgatctccgtcttgaacgctggcaaaaagatcgagatatctttgtgaaaaaggcagaatctctcggcgcgaaagtatttgtacagtctgcaaatggcaatgaagaaacacaaatgagccagattgaaaacatgataaaccggggtgtcgatgttcttgtcattattccgtataacggtcaggtattaagtagcgttgtaaaagaagccaaacaagaaggcattaaagtattagcttacgaccgtatgattaacgatgcggatatcgatttttatatttctttcgataacgaaaaagtcggtgaactgcaggcaaaagccctggtcgatattgttccgcaaggtaattacttcctgatgggcggcagcccggtagataacaacgccaagctgttccgcgccggacaaatgaaagtgttaaaaccttacgttgattccggaaaaattaaagtcgttggtgaccaatgggttgatggctggttaccggaaaacgcattgaaaattatggaaaacgcgctaaccgccaataataacaaaattgatgctgtagttgccagtaacgatgccaccgcaggtggggcaattcaggcattaagcgcgcaaggtttaagtgggaaagtagcaatctccggccaggatgcggatctcgcaggtattaaacgtattgctgccggtacgcaaactatgacggtgtataaacctattacgttgttggcaaatactgccgcagaaattgccgttgagttgggcaatggtcaggaaccaaaagcagataccacactgaataatggcctgaaagatgtcccctcccgcctcctgacaccgatcgatgtgaataaaaacaacatcaaagatacggtaattaaagacggattccacaaagagagcgagctgtaagcgttacgccccagcgcggagcgggggcgtgatttctctccatgccgcgtgaatgaattggcttaggtggagtcgttatgccttatctacttgaaatgaagaacattaccaaaaccttcggcagtgtgaaggcgattgataacgtctgcttgcggttgaatgctggcgaaatcgtcagtctttgtggggaaaatgggtctggtaaaagtacgctgatgaaagtgctgtgtggtatttatccccatggctcctacgaaggcgaaattatttttgcgggagaagagattcaggcgagtcacatccgcgataccgaacgcaaaggtatcgccatcattcatcaggaattggccctggtgaaagaattgaccgtgctggaaaatatcttcctgggtaacgaaataacccacaatggcattatggattatgacctgatgacgctacgctgtcagaagctgctcgcacaggtcagtttatccattagtcctgatacccgcgttggcgatttagggcttgggcaacaacaactggttgaaattgccaaggcacttaataaacaggtgcgcttgttaattctcgatgaaccgacagccagtttaactgagcaggaaacgagcattttactggatattattcgcgatctacaacagcacggtatcgcctgtatttatattagccacaaactcaacgaagtcaaagcgatttccgatacgatttgcgttattcgcgacggacagcacattggtacgcgtgatgctgccggaatgagtgaagacgatattatcaccatgatggtcgggcgagagttaaccgcgctttaccctaatgaaccacataccaccggagatgaaatattacgtattgaacatctgacggcatggcatccggttaatcgtcatattaaacgagttaatgatgtcagcttttccctgaaacgtggcgaaatattgggtattgccggactcgttggtgccggacgtaccgagaccattcagtgcctgtttggtgtgtggcccggacaatgggaaggaaaaatttatattgatggcaaacaggtagatattcgtaactgtcagcaagccatcgcccaggggattgcgatggtccccgaagacagaaagcgcgacggcatcgttccggtaatggcggttggtaaaaatattaccctcgccgcactcaataaatttaccggtggcattagccagcttgatgacgcggcagagcaaaaatgtattctggaaagtatccagcaactcaaagttaaaacgagctcccccgaccttgctattggacgtttgagcggcggcaatcagcaaaaagcgatcctcgctcgctgtctgttacttaacccgcgcattctcattcttgatgaacccaccaggggtatcgatattggcgcgaaatacgagatctacaaattaattaaccaactcgtccagcagggtattgccgttattgtcatctcttccgaattacctgaagtgctcggccttagcgatcgtgtactggtgatgcatgaagggaaactaaaagccaacctgataaatcataacctgactcaggagcaggtgatggaagccgcattgaggagcgaacatcatgtcgaaaagcaatccgtctgaataacgcattgaggagcgaacatcatgagcaaaagcaatccgtctgaagtgaaattggccgtaccgacatccggtggcttctccgggctgaaaagtctgaatttgcaggtcttcgtgatgattgcagctatcatcgcaatcatgctgttctttacctggaccaccgatggtgcctacttaagcgcccgtaacgtctccaacctgttacgccagaccgcgattaccggcatcctcgcggtaggaatggtgttcgtcataatttctgctgaaatcgacctttccgtcggcagtatgatggggctgttaggtggcgtcgcggcgatttgtgacgtctggttaggctggcctttgccacttaccatcattgtgacgctggttctgggactgcttctcggtgcctggaacggatggtgggtcgcgtaccgtaaagtccctagttttattgtcaccctcgcgggcatgttggcatttcgcggcatactcattggcatcaccaacggcacgactgtatcccccaccagcgccgcgatgagtcaaattgggcaaagctatctccccgccagtaccggcttcatcattggcgcgcttggcttaatggcttttgttggttggcaatggcgcggaagaatgcgccgtcaggctttgggtttacagtctccggcctctaccgcagtagtcggtcgccaggctttaaccgctatcatcgtattaggcgcaatctggctgttgaatgattaccgtggcgttcccactcctgttctgctgctgacgttgctgttactcggcggaatgtttatggcaacgcggacggcatttggacgacgcatttatgccatcggcggcaatctggaagcagcacgtctctccgggattaacgttgaacgcaccaaacttgccgtgttcgcgattaacggattaatggtagccatcgccggattaatccttagttctcgacttggcgctggtagtccttctgcgggaaatatcgccgaactggacgcaattgcagcatgcgtgattggcggcaccagcctggctggcggtgtgggaagcgttgccggagcagtaatgggggcatttatcatggctagtctggataacggcatgagtatgatggatgtaccgaccttctggcagtatatcgttaaaggtgcgattctgttgctggcagtatggatggactccgcaaccaaacgccgttcttgattttgataaaaattttctcaaagccggttacgtattaccggttttgagtttttgcatgattcagcaggaaaagaaccatgtttactaaacgtcaccgcatcacattactgttcaatgccaataaagcctatgaccggcaggtagtagaaggcgtaggggaatatttacaggcgagtcaaagcgaatgggatattttcattgaagaagatttccgcgcccgcattgataaaatcaaggactggttaggagatggcgtcattgccgacttcgacgacaaacagatcgagcaagcgctggctgatgtcgacgtccccattgttggggttggcggcagctatcaccttgcagaaagttacccacccgttcattacattgccaccgataactatgcgctggttgaaagcgcatttttgcatttaaaagagaaaggcgttaaccgctttgctttttatggtcttccggaaagtagcggcaaacgttgggccactgagcgcgaatatgcatttcgtcagcttgtcgccgaagaaaagtatcgcggagtggtttatcaggggttagaaaccgcgccagagaactggcaacacgcgcaaaatcggctggcagactggctacaaacgctaccaccgcaaaccgggattattgccgttactgacgcccgagcgcggcatattctgcaagtatgtgaacatctacatattcccgtaccggaaaaattatgcgtgattggcatcgataacgaagaactgacccgctatctgagccgtgtcgccctttctagcgtcgctcagggcgcgcggcaaatgggctatcaggcggcaaaactgttgcatcgattattagataaagaagaaatgccgctacagcgaattttggtcccaccagttcgcgtcattgaacggcgcagtacagattatcgcagcctgaccgatcccgccgttattcaggccatgcattacattcgtaatcacgcctgtaaagggattaaagtggatcaggtactggatgcggtcgggatcagccgctccaatcttgagaagcgttttaaagaagaggtgggtgaaaccatccatgccatgattcatgccgagaagctggagaaagcgcgcagtctgctgattagtaccaccttgagcatcaatgagataagccaaatgtgcggttatccaagcctgcaatatttctactctgtttttaaaaaagcatatgacacgacgccaaaagagtatcgcgatgtaaatagcgaggtcatgttgtaacgatgatgagaattgtcggcgtcacatcaggtaacgctgcgtggttgtcggatgcggcgtgaacgccttatccgacctacccgccaggcatgataaaacgcaccaacaacgcttcaggctcgtagctcaactgcctgagacaaagtaaaaagccttatccgactgacaagtcggataaggctcaaggaaatgcaattacatatgcgccgcgattaaccgttggttatcctggtacattgcgaacaggtagttgttataactcttccctttggtgctgtagcccttcagcttgtgaatcatcgctgtggcagtcacttcctgatccgctttacgcagctgcgcacggcttttacggaagctagagtaagccgggtgcgtattcaggttagtgacataggcgctcacgctttctttgacagaactaaactgactgtaccctttcactttacctggcgcattggtacaacgtcctttcatgcatttcatgccgaacaggttgttgttgttgcgcgccagcttgctcgttccccaaccgctttctgctgcagccatcgtcgccaccatactggtggggataatgtctacgcgttcaagcaaggtattccacgggatttttcgcgtattaccggaccacttcaccttgtagcgtttggcgatgtctttcagacgcgcacgctcagcaggactccattggccctgatactgtttactaatgagccagttacgttccgcagtaatggccgcattttggctggtaatgtaaggcattacggtccggagaaacgcctttttccttggtgttccggaagggtattttcgcaaatcaggaagactactactctttgcactattgcgagaatactcttgtttactgcttacctgtttattactagctttagttaagtgggacttttgactcgctgttgttgtgtgcgtcttcgctaacacctcactgctaaacaccagagtgagtaacataagaatcatcgccccatatcgtcgtatgggagtcaaaatcatcaggtctcctggtcggatttaatcattccaacaccttatatttttcacaaatttgagagttgaatctcaaatcatatcaaaaatagctgtcaagagcaccccaaggaatagtccaaatctgaaactatgtcacgtgttaacgattcagattggcgctaaatcgcagaaaatgtgggggttatcgcaaaattcagccgttttttgcgcgagatcgctcacccttgcttctcatcctgtggacttaccgctcagggatgagttttgtttggcttatcgctggcaaactgtctgaaatcgcagcaataaggactcatccgccatgaaactcgccgcctgttttctgacactccttcctggcttcgccgttgccgccagctggacttctccggggtttcccgcctttagcgaacaggggacaggaacatttgtcagccacgcgcagttgcccaaaggtacgcgtccactaacgctaaattttgaccaacagtgctggcagcctgcggatgcgataaaactcaatcagatgctttccctgcaaccttgtagcaacacgccgcctcaatggcgattgttcagggacggcgaatatacgctgcaaatagacacccgctccggtacgccaacattgatgatttccatccagaacgccgccgaaccggtagcaagcctggtccgtgaatgcccgaaatgggatggattaccgctcacagtggatgtcagcgccactttcccggaaggagccgccgtacgggattattacagccagcaaattgcgatagtgaagaacggtcaaataatgttacaacccgctgccaccagcaacggtttactcctgctggaacgggcagaaactgacacatccgcccctttcgactggcataacgccacggtttactttgtgctgacagatcgtttcgaaaacggcgatcccagtaatgaccagagttacggacgtcataaagacggtatggcggaaattggcacttttcacggcggcgatttacgcggcctgaccaacaaactggattacctccagcagttgggcgttaatgctttatggataagcgccccatttgagcaaattcacggctgggtcggcggcggtacaaaaggcgatttcccgcattatgcctaccacggttattacacacaggactggacgaatcttgatgccaatatgggcaacgaagccgatctacggacgctggttgatagcgcacatcagcgcggtattcgtattctctttgatgtcgtgatgaaccacaccggctatgccacgctggcggatatgcaggagtatcagtttggcgcgttatatctttctggtgacgaagtgaaaaaaagcctgggtgaacgctggagcgactggaaacctgccgccgggcaaacctggcatagctttaacgattacattaatttcagcgacaaaacaggctgggataaatggtggggaaaaaactggatcagaacggatatcggcgattacgacaatcctggattcgacgatctcactatgagcctagcctttttgccggatatcaaaaccgaaagtactaccgcttctggtctgccggtgttctataaaaacaaaatggatacccacgccaaagccattgacggctatacgccgcgcgattacttaacccactggttaagtcagtgggtccgcgactatgggattgatggttttcgggtcgataccgccaaacatgttgagttgcccgcctggcagcaactgaaaaccgaagccagcgccgcgcttcgcgaatggaaaaaagctaaccccgacaaagcattagatgacaaacctttctggatgaccggtgaagcctggggccacggcgtgatgcaaagtgactactatcgccacggcttcgatgcgatgatcaatttcgattatcaggagcaggcggcgaaagcagtcgactgtctggcgcagatggatacgacctggcagcaaatggcggagaaattgcagggtttcaacgtgttgagctacctcagcagccatgatacccgcctgttccgtgaagggggcgacaaagcagcagagttattactattagcgccaggcgcggtacaaatcttttatggtgatgaatccagccgtccgttcggtcctacaggttctgatccgctgcaaggtacacgtagcgatatgaactggcaggatgttagcggtaaatctgccgccagcgtcgcgcactggcagaaaatcagccagttccgcgcccgccatcccgcaattggcgcgggcaaacaaacgacacttttgctgaagcagggctacggctttgttcgtgagcatggcgacgataaagtgctggtcgtctgggcagggcaacagtaacttttccggcttcccgttcgtcagtacctcgggaagccgccaaccaggataaaatgtcagccctaatcagcgttgcaggataaagcaccgctcactcttcaacagaccgatttgcaccccagcaaatgtagcgttattgttaccttccttgctacagagttcgacagatatcccgctatgacattctccctttttggtgacaaatttacccgccactccggcattacgctgttgatggaagatctgaacgacggtttacgcacgcctggcgcgattatgctcggcggcggtaatccggcgcagatcccggaaatgcaggactacttccagacgctactgaccgacatgctggaaagtggcaaagcgactgatgcactgtgtaactacgacggtccacaggggaaaacggagctactcacactgcttgccggaatgctgcgcgagaagttgggttgggatatcgaaccacagaatattgcactaacaaacggcagccagagcgcgtttttctacttatttaacctgtttgccggacgccgtgccgatggtcgggtcaaaaaagtgctgttcccgcttgcaccggaatacattggctatgctgacgccggactggaagaagatctgtttgtctctgcgcgtccgaatattgaactgctgccggaaggccagtttaaataccacgtcgattttgagcatctgcatattggcgaagaaaccgggatgatttgcgtctcccggccgacgaatccaacaggcaatgtgattactgacgaagagttgctgaagcttgacgcgctggcgaatcaacacggcattccgctggtgattgataacgcttatggcgtcccgttcccgggtatcatcttcagtgaagcgcgcccgctatggaatccgaatatcgtgctgtgcatgagtctttccaagctgggtctacctggctcccgctgcggcattatcatcgccaatgaaaaaatcatcaccgccatcaccaatatgaacggcattatcagcctggcacctggcggtattggtccggcgatgatgtgtgaaatgattaagcgtaacgatctgctgcgcctgtctgaaacagtcatcaaaccgttttactaccagcgtgttcaggaaactatcgccatcattcgccgctatttaccggaaaatcgctgcctgattcataaaccggaaggagccattttcctctggctatggtttaaggatttgcccattacgaccaagcagctctatcagcgcctgaaagcacgcggcgtgctgatggtgccggggcacaacttcttcccagggctggataaaccgtggccgcatacgcatcaatgtatgcgcatgaactacgtaccagagccggagaaaattgaggcgggggtgaagattctggcggaagagatagaaagagcctgggctgaaagtcactaaaaattgcctgatgcgctacgcttatcaggcctacatgatttctgcaatatattgaatttggaagaatttgtaggccggataaggcgtttacgccgcatctggcataaacaaagcgcactgttccggcgttgagaaacgccggaaaacgtttcaaacaggctgctgccgtagccgatgccgctgcactttctcgacatccatgcactgcaacgcctttgtcgggcaggcttcaacacaggccggtcccgtctcccgatgccagcacagatcgcacttaatcgccctcgcctttttgcggctagaaacgacctccatcgcaccaaacgggcaagccagcatacagcttttacagccaatgcaacgtgtttgttcaacgaaaatatgcccatgttcgcggcttatcgcgtcaacagggcagacattcgcgcacggtgcatcttcacactgatgacaggctactgccgtggtccagcagtggtctttaatgacacgaatacgggaaataaactcgtctggactcaacgcagcgcaatcctgattctcatgatggctcactgcgcaagccacttcacaggtacggcaaccgatacatttcgtcgcatccgcaataataaaccggttcatgatcactcctttgcactaaaacagcagagtgccagagagcgcgtccctactgctttgatccaacgaaggaaatgttaaagttttggcacttgtccaaagcgttatgtgatcgcgcccaggtcatccctgacagtaaatcccagttcattagaaatagcctgcgcggtttcacgcagtggtttcaggagatttttctctcccacctgtttcagacgacttgtgctaaggctaatgctcacggcgtacggcacccgcccatgaatatcaaacaccggaacagcaatacaggagacgccgagttcgttttcttctctgtccatcgccgctccgctttcacgaatgtgcgccagttcgtcgaacatcgcgggcagctcggtaatggtattgcgggttaacggctggatctcatgctgatggctttcccagtaactcttcacgtagtccgggtgaccaaacgccatgtagatcttgcccattgcggaacagtagagcggcatatgctggccaatataggcacgggttcgcagcatcccggttgtgggttccagcttataaatcaaaatagcgtgatcgtcttcgcggctggagaagttaatggtttcaccagtggcgatgttcagtgcctcaagatgcggagcggcgatatgaatgatattcaggctagacagcgccttctgcccgacggcaataaatttggtggtcaggcgataactccctgcggcaggcgcggtggtcacatagccgcaggactgtaatccctgcaataagcgatggacggtactcttatttaaaccagccagctcgctaagatgcgccaacggacaaccgtttggatagttgctcaaaatctcaatcagcatcaacccgcgaaacagactctggcttccggctggacgctctttttcctgcgccatctcgttctctttttttcccatcacttctttccccattttgtcgcgtcctgatggtagcgcaaagtgtgccgtagttcacgatctcgacagataatttataaccaattgatttttatgtcttttgaaattcatcaatcagattgccttgttaaaaagtgatcgatatatttgaaatcaagtttcgcatattgaaattttaagccaaaaaagcgatcaaaaaaacaaggaagcctgggatgaaagtgacatttgagcagttaaaagcagcctttaatcgggtcttaattagtcgcggcgttgacagcgaaacggctgacgcctgtgcagagatgttcgcccgcaccaccgaatccggcgtttattctcacggcgttaatcgtttccctcgtttcattcaacaactggaaaacggcgatatcattcctgatgcccaacccaaacgtataaccagcctcggcgcaattgaacagtgggacgcccagcgtagcatcggtaacctgacagcgaaaaagatgatggatcgcgccattgaactggctgccgatcacggtattggtctggtggcactacgtaatgccaaccactggatgcgcggcggcagctacggctggcaggcggcggaaaaaggctatattggcatttgctggaccaactccatcgccgtaatgccgccgtggggcgcaaaagagtgtcgcataggcactaacccgctgatcgtcgccattccttccacgccgatcaccatggtcgatatgagcatgagcatgttctcttacggcatgttagaagttaaccgtctggcaggtcgtcagctcccggtcgatggtggctttgatgatgagggcaatttgaccaaagaacctggcgttatcgagaagaatcgccgcattttgccgatgggctactggaaaggttctggcatgagcattgtgctggatatgatcgctactctcctttccgacggcgcatccgttgccgaagtcacccaggacaacagcgacgaatacggcattagtcaaatttttattgccattgaagtggacaagcttatcgacggtcccacccgcgatgccaagctgcaacgcatcatggattacgttactagtgccgagcgtgctgacgaaaatcaggccattcgcttacccggccatgaatttactaccctgctggccgaaaaccgccgtaacggcatcactgttgatgacagcgtgtgggccaaaatccaggcgttatgaggagataagtcatgatttttggacatatcgcgcagcccaatccgtgccgtttgcccgccgccattgaaaaggcgctcgattttctgcgcgctaccgatttcaacgccctggagccgggcgttgtcgaaatcgacggcaaaaatatttatacgcaaattatcgatttaaccacacgcgaagcggtggtaaaccgtccggaagtgcatcgtcggtatatcgatattcagtttctggcgtggggcgaagagaaaatcggcattgctattgatacgggaaataataaagtcagcgaaagtctattagagcagcgcaatattattttttatcacgacagtgaacatgaaagttttatagaaatgataccgggcagctacgcaattttctttccgcaggatgttcaccgaccaggttgtattatgcaaacagcctctgagatacgaaaaattgtggttaaagtcgcattaacggcgctgaattaatcgaataatcgtctacgccagaacgcctgggtaatgttattgctctaactatattaataattcaggttgctgcacatgcgacttgaattatgacagacatagcctcaaggaatagctatgaaaaaaatactcgaagcaatactggcgattaatctcgccgtactttcctgtattgtatttataaacattattttaagatatggttttcagacaagcattttatctgttgatgaattgagtcgttatttatttgtctggttaacgtttattggcgcgattgtagcttttatggataacgcccacgttcaggtcacctttctggtggagaaactctcccccgcatggcagcgacgagtcgctctggttacccattccttaatcttatttatttgtggcgcactggcctggggcgcaacgctaaaaacaattcaggactggagcgattatagtccgatcctcggtttacccatcggcctgatgtatgccgcttgtctgcccaccagcctcgttatcgcattctttgaactgcgtcatttatatcaactcatcacgcgtagcaattctctaacgagcccaccgcaaggagcttaatcatggctgtgctgatttttctgggctgtctgttgggtggtattgctatcggtttgcctattgcctgggcactgttgttgtgcggggcggcgttaatgttctggctggacatgtttgatgtccagatcatggcacaaacgctggtgaacggagccgatagcttctccctgctggcgattccgttctttgtgctggcgggtgaaatcatgaatgcgggcggcttgagtaaacgcattgttgacctgccgatgaaactggtggggcataaaccaggcgggctgggctacgtcggcgtgctggcagctatgattatggcgagcctttctggttctgccgttgcggataccgccgccgttgccgctctactggtgccgatgatgcgcagcgccaactatccggtcaaccgggcggcggggctgattgcctctggcggcattatcgcgccaattattcccccttccattccgtttattatcttcggcgtttccagcggattatccatcagtaagctgtttatggcgggcattgcccctggcatgatgatgggcgcaacgctgatgcttacctggtggtggcaggccagtcgccttaatttaccccgccagcaaaaagcaacgatgcaggaaatctggcactcttttgtctccggtatctgggcgctgtttcttccagtcatcattattggcgggtttcgctccggcctgtttacccctaccgaagccggggccgttgctgctttctatgcgctgtttgtcgccacagttatttaccgtgaaatgaccttcgccacactttggcatgtactcattggcgcggcgaaaaccaccagtgtggttatgtttctggtggccagcgcacaagtttccgcctggctgattaccattgctgaactgccgatgatggtttctgatttactgcaaccgttggtcgatagtccgcgtctgctgtttatcgtcattatggtggctatcctgattgtcggcatggtcatggatttaacgccgacggtattaattcttaccccggtattaatgcctttagttaaagaggcaggaatcgatccgatttatttcggtgtcatgtttatcattaactgcagtatcggcttaattacaccgcctatcggtaatgtacttaacgttattagtggggtggcaaaactcaaattcgatgatgcagtcagaggcgttttcccttacgtcctggttttatatagtttattagtcgtatttgtttttattcccgatctcatcatcctccctttgaaatggattaattaaaaggaaaatattatgaaattacgctctgtaacctacgcattattcattgctggcctggctgcattcagcacatcttctctggcggcacaatctttacgtttcggttatgaaacaagtcaaaccgacagccaacatattgcggcgaaaaaattcaatgatttattgcaggagagaaccaaaggcgagctgaaattaaaactgttcccggacagcactctcggtaacgcgcaggcgatgatcagcggcgtacgtggcggcaccatcgatatggaaatgtccggcagcaataactttgccgggttaagtccagtgatgaacttgcttgatgtccctttcctgttccgcgataccgctcacgcgcataaaacgctcgacggcaaagtcggtgatgatctgaaagccagtcttgaaggtaaaggactgaaagtactggcctactgggaaaacggctggcgcgatgtcaccaacagccgcgcaccggttaaaacccccgccgacctgaaagggctgaaaatccgcaccaacaatagcccgatgaatatcgccgcattcaaagtctttggcgctaacccgatcccgatgccgtttgccgaagtctataccgggctggaaacccgcactatcgacgctcaggaacacccgatcaacgtcgtctggagtgcaaaatttttcgaagtgcagaagttcctttctctgacgcaccacgcctattccccgcttctggtggtgatcaacaaagcgaagtttgatggcttaagtccggagttccagcaggcgctagttagttctgcacaagaagcgggtaactatcagcgcaaactggttgctgaagatcagcaaaaaatcatcgacggcatgaaagaagcgggcgtggaagtcatcaccgatctcgaccgcaaagcctttagcgacgcactggggaatcaggttcgcgacatgtttgttaaagatgtgccgcagggagctgatctgctgaaagccgtggatgaggtgcaataaaccatgacgcaatactggctggggttagattgtggcggtagctggctgaaagccgggctgtatgaccgcgaaggccgggaggcaggcgtgcagcgcctgccgctgtgcgcattaagcccgcagccaggctgggcagagcgcgatatggcagaactgtggcaatgctgcatggctgtcattcgcgccctgcttactcattctggtgttagcggggaacaaattgtcggtatcggcatctccgcacagggaaagggcttgtttttgctggataaaaacgacaaaccgctcgggaatgctattttgtccagcgaccgccgggcgatggaaatcgttcgtcgctggcaggaagatggcatcccggaaaaactctacccgctgacccgacaaaccttgtggaccgggcatccggtgagcctgttacgctggctgaaagagcacgaaccagaacgctacgcgcaaattggctgcgtgatgatgacgcacgactacctgcgctggtgtttaactggcgtcaaaggctgtgaagagagcaatatttccgagtccaacctctacaacatgagtcttggggaatatgacccgtgcctcaccgactggctggggatcgctgaaatcaatcacgccctgccgcctgttgtcggatctgccgaaatctgcggggagatcaccgctcagacagccgccctgaccggtctgaaagcgggtacgcccgttgttggcggcctgtttgatgtggtttccaccgcactctgcgccgggatcgaagacgaatttaccctcaatgcggtgatggggacctgggcggtgaccagcggcataacccgcggtttacgtgacggtgaagcgcatccgtatgtctatggtcgctacgttaacgatggtgaatttatcgttcacgaagccagccctacctcttccggcaacctcgaatggtttaccgcacagtggggagaaatcagctttgatgagatcaatcaggccgttgccagcttgccgaaggctgggggcgatctctttttcctgccgttcctgtacggcagcaacgccggactcgagatgaccagtggtttctacgggatgcaggccattcacacccgcgcgcacctgttgcaggccatctatgaaggggtggtgttcagccatatgacccacctcaaccgaatgcgcgaacgttttactgatgttcacaccctacgcgtcactggcggcccggcgcactccgatgtctggatgcaaatgctggcggacgtcagcggtctgcgtatcgagctgccgcaggtggaagaaaccggctgctttggtgcggcccttgccgcccgcgtcggcaccggggtttatcacaacttcagcgaagcccaacgtgacttgcgacacccggtgcgcaccctgctgccagatatgaccgcccatcagctttaccaaaaaaaatatcaacgttatcagcatctcattgccgcacttcagggctttcacgcccgcattaaggagcacacattatgagccgaccacttctgcaactggccctcgaccacagtagtcttgaagccgcgcagcgcgacgtgacgctgttaaaagacagcgtcgatatcgtcgaagcgggcaccattctctgtttaaacgaagggcttggcgcggtgaaagccttgcgcgaacagtgcccggacaaaatcatcgttgctgactggaaggtcgccgacgctggtgaaacgctcgcgcaacaggcgtttggcgcaggcgctaactggatgaccatcatctgcgccgcgccgctcgcgacggtagaaaaaggccacgcaatggcacaacgctgcgggggtgaaattcagatagagctgttcggtaactggacgctggacgacgcccgcgactggcatcgtattggcgtgcggcaggccatttatcatcgcggtcgtgatgcacaggccagcgggcaacagtggggcgaagccgatctggcacgcatgaaggcgcttagtgatatcggccttgagctttccattactggcgggattacccctgctgacctgccgctgtttaaagatatccgcgtgaaagcgtttattgccgggcgggcactggcaggcgcggcaaatccggcgcaagtggctggcgatttccatgcgcaaatcgacgctatctggggaggtgcgcgtgcgtaatcatcagttagggatttatgaaaaagcgctggcgaaagatctctcctggccggagcggctggtgctggcaaaaagctgcggttttgattttgtcgaaatgagcgtggatgaaaccgacgaacggctcagtcgtcttgactggagcgccgcacaaaggactagcctggttgccgcgatgatcgaaacaggtgttgggatcccgagcatgtgcctgtccgcacatcgtcgctttccctttggtagccgtgacgaggcagtgcgcgaacgggcgcgggaaatcatgagtaaagcgattcgcctggcgcgcgatctcggcattcgcaccatccagctggcaggttatgacgtctattacgaagaccacgacgaaggcacccggcaacgttttgctgaagggctggcgtgggcagtcgaacaggcggcggcaagtcaagtaatgctggcggtggagattatggataccgcgtttatgaactccatcagcaaatggaaaaaatgggacgagatgctcgccagtccgtggttcaccgtctacccggacgtcggcaacctcagcgcctggggcaatgatgttcccgccgaactgaaactgggcattgaccgtatcgccgcgatccacctgaaagacacccagccagtcaccgggcaaagtcccggacagttccgcgacgtgccgtttggcgaaggctgcgtcgatttcgttggcatcttcaaaacgctgcataaactgaactatcgcggttctttcctgattgagatgtggaccgaaaaagccaaagagccggtgctggagattattcaggcgcggcgttggattgaagcgcgtatgcaggaggctggatttatatgttaacgtaaatgcaggaggctggatttatatgttagagcaactgaaagccgacgtgctggcggcgaatctggcgcttcccgctcaccatctggtgacgttcacctggggcaatgtcagcgcggtagacgaaacgcggcaatggatggtaatcaaaccttccggcgtcgagtacgacgtgatgaccgccgacgatatggtggtggttgagatagccagcggtaaggtggtggaaggcagcaaaaaaccctcttccgatacaccaacgcatctggcgctctaccgtcgctatgccgaaattggcggtattgtgcatacccacagccgccacgccaccatctggagtcaggccgggctggatctccccgcctggggcaccacccacgccgattatttttacggtgccatcccctgcacgcgacagatgaccgcagaggagattaacggcgaatatgaatatcagaccggcgaagtgatcattgaaaccttcgaagaacgtggcaggagtccggcacaaatcccggcggtgctggtgcattctcacggcccgttcgcatggggtaaaaacgccgccgatgccgtgcataacgccgtagtactcgaagaatgcgcctatatgggtctattcagccgccagcttgcgccgcagctccctgcgatgcaaaacgaactgctggataagcactacctgcgtaagcatggggccaatgcctattacgggcagtaatccctcacgccggggcttcatcgccccggcactacgaattgatatgttccttgctgtaacgccgcttccacgctgctggcgttaaaccagtatgtttctgaaaaatctgccggaaatagccaacgtcattaaaccgtattgcatggagcaggccgacaacgtcgagtcactgcataacctgttgctgcccgccgatgcgccatttacgacatttgaaggcaagggattgttcagccataagatcctgattcagacgccaggttcccggtatgaacagagcaatccagagcaacaacctttgtggcattacgacggagcaccagccgcaccgacatccaccggtgaattaaaaacgccagctcaccccggtgacaaaggtaaaactctcattacgatcaatcatcgggctgtcggtaatctcttccggcagctcgctgtatcctgcgctcgccatcaatacgacgtgctctcctatcgggtattttgccgtcaggctgacatagggcacccaggcatcctgcgcggaataacttgccagaccgctacgacgggactcactctcactaatgccatagtaatagtcactgaaattctcgtcataatagagaacgcccagcgcaggtgtcaggctcagacgacctatccgcattttgtggaatacgcttagctcccccacccagccgttgctgttatccagaacgtccgcagctgcagaggctttcacggttccccaacgctcgtggtgataccaggcaacccccgccatagccgtactatcacgcttatcaagctgttgcatggcataatcgtcattatcggtagggtcaaattccagcggcatccaggatgcggtcaggctaagttcatttttttcactttggctcagaataaaacctaacgtggtctgacgaacataaaaagtatcaccttcataactaatcagcggaattgccttcgtattttcattataaccgcgataagggctttcattataagccgcaccagcaccaatggataattcagaagcagttgcgcttgccataaaaggcaacgcaaataacgccacaatattgcgattaattaacatgtccggtattccattttaaaataagataaaaaagagtcggcataataatgcttacaatttctccggtgcaagattcatatttatatagtaatatataaaattatatataattgggctgttgcgatgacaaaattacaacttaagtaccgggagttaaaaattatcagcgtaatcgctgccagtgaaaatatcagccatgccgcgactgtacttggcatcgcacaggccaacgtcagcaaatatcttgctgattttgaaagtaaagtgggtttaaaagtccttgaccgaaccacccggcagctgatgctcacaccttttggcaccgcgctgttaccgtacatcaacgacatgctggacagaaacgagcaacttaataattttattgcagattataagcatgagaaacgtggtcgggtcaccatctacgccccaaccggcataattacctatttatccaaacatgtaatcgataaaattaaagatatcggtgatatcaccttaagcctaaaaacctgcaatcttgagcgtaatgccttttatgaaggcgtcgaatttcctgatgattgtgatgttttaatcagctacgctccaccaaaagatgaaagcctggttgccagttttattacccaatatgccgtaaccgcttatgccagccagcgctatcttgagaaacatcccattagccgtcctgacgaactcgaacatcactcctgtattttgatcgacagcatgatgatcgacgacgcgaatatctggcgcttcaacgtcgccgggagtaaagaggtgcgggattatcgcgtgaagggaaattacgtttgcgacaacacgcaatctgcgctggagctggcacgaaatcacctggggattgtgtttgcgccagacaaaagtgtgcagagcgacctgcaagacggcacgctggtgccctgctttcagcaaccctatgaatggtggctggatctggtggctatcttccgtaaacgggaataccagccctggcgggtccagtatgtgctggatgaaatgctgcgtgaaattcgccaccagcttgctcagagccagcaactgcggcctgaacaagcggcggaaagcgaagattaatgatcgagataaaggtaatgcacccagctggtcatgcgtaatagcactttgcgcatcacgctgacatggctgaaatgatcagagtaaaccgccacctgggcgtaaataccgtctggtaaagcgctcaaatcagtgtgctcatccagttcaatggtcgcgataacgccatcactacccggcgctgtgtttaacgtctgtaaggtgccggtgctctgataagctccgccgggaacggctggactaatggctgccagcttaccgctgaataccttacctggcagagcattaaacaccacttccgcatcgtcgccaggagccagtcgcagcaaggagttctgacggaactgcgccacgatttgtcgtttctgatcgggtataaacaccatcaccggacgtagcggcaggctcgcggcataggtacccggacgaatcagtacctgggtcacataaccatcgctcggcgcacgcactatcgtctgctcaaggttatattttgcttccgcgagctgtgctttcaggctggcgatttgagaatgttcacccaacaccaggctatccagctggctctggatctgtttttgttccgccgcgctactcttcacggaggcttcctgcgccagataattttgccgcgccacatcgatatcgcgttcactaaacgggtttactttcgcctggctgccacgtgcgtaacgctgatactctttagcgaatttatcccgcgtggcctttgcctgctgagtattcgccgccatctcatctaactctgcgcccaacgcccgctgtttatgttctgcggtaacgatatccgccatcagccgatccacccgcgcctgataacgcgtcgggtccagtcgaaatagcacctcaccttttttaatcagcgtatttttcttatccgtcacttcaatcaccacaccagtcacctgtgggacaacaggaatagaaataaccgctttttgcgctttaaaggtatacggatggttatagttcattaacagaattagaccgctgacaataaatattccacccagggccgctgtgggaatggtccatttatttacgggaattttgaagatcttaaacattgcccatgcaaaagccacataggtcaaaataatcagtaaatccataagtattactcggcagaagaggatttgatgtcggcgagctgtttctccagcccggcaatgcgctgttgcagttgcataacggaactatcatggctttgcattccccatccccgctccgggcggtaaagcgtggcccaaatccacaaaaacggccagataacatgtaacgtaaaaagactcacccaaccagcaacatgaatggcgtcggcatgaggatgattacgttttttggcaatcaggtagggaatatcatgtaaaataatgatcccatagaagatcaccagaaatacaaaaataagcactcccagtgcaaaatagtccaggaacatatttccctcaaagaatataaaaaagaacaattaacgcatattatgaaatgccatgatgcagtgcaatttccttatttatataacgacatattgttttttatatactttcttaaatgtgctgtctggtttttcaacaggacgaggtttatcatattgaaatagtggaactattggccaaactaatgaataactccagtaaaacatccacagtacagattaagcgtattaaaccttcaattatctaccgtttattgctgattggcctcggatcaccaatggtgatttacggcctggttcgcccgctcaccatcgaaacgcgagattaaactcctgacaaaacacgccccagaaacgtacttctgttggcgtagtctgggttattgcgcacgtaggtttaaaacgtaaattgtaacaacgtgcgctttgtttatgccggatgcggcgtgtacgccttatccggcctacggtcaggttcccgtaggcatgataagacgcgtaagcgtcgcatcaggcaatgaatacccaatgcgaccagcttcttatatcagaacagccccaacggtttatcgctgtagctcaccagcaggcacttggtttgctggtaatgctccagcatcatcttgtgggtttcgcgaccgataccactttgtttgtagccaccaaacgccgcatgtgccgggtaagcgtgataacagttggtccacacgcgcccagcctgtatgccgcgccccatcttataggccagattaccgttgcggctccagacgcccgcgcccaggccatattgcgtatcgttcgccagctccagcgcttcttccatcgttttgaaggtggtcaccgccagcaccgggccaaaaatctcctcctggaacacccgcatattgttctgaccaaacagaatcgtcggttcgaggtagtagccgtctttcagttcaccttccagcagcttgcgccgcccgcctgtgagcacgtcagcgccctcttttttaccgatatcaatgtagttgaggatggtttccagttgcccgtgagaaacctgcgcgcccatttgcgtcacgctgtcgagcgggttaccgctacgaatgctttcgacacggcggatggcgcgttccataaagcgttcgtagatagattcctgcactaaagcacgactcggacaggtgcaaacttcgccctggttaaaggcaaacagtgcaaagccttccagcgctttatcgaaaaaggcatcttcttcatccatcacatcagcaaagaagatatttgggctcttaccgcccaactccagcgtcaccggaataatgttttgcgttgcgtattgcataatttgttggcccacttccgtactgccggtaaacgccactttggcgatgcgtttgctggtcgccagatattcgccaattaccccacctgcgccattgaccacgttcaccacgcccggcggcagtaaatcaccgacaatttccattagcagcagtacagaaagcggggtaagacgtgcgggtttcagcaccacacagttgcccgccgccagcgcgggagccattttccagctcgccatcagcagcgggaagttccacgggataatctgccccaccacgcctaacggttcatggaaatgataggccacggtttcgctatcaacttcactgatcccaccttcctgcgcccgaatacagctggcgaaatagcggaaatggtcaatcgccagcggtacatccgcagcactggtttcgcgaatgggtttgccgttatcccaggtttcagctgtcgctaacagctcgaggttttgttccattcgatcggcaatcttaaacagaatcgccgcacgatcctgcacgctggtgtgcgcccatttatctttcactttgtgcgcagcatccagcgccagatcgatgtctcgtttgccgctagacgccacttcgcacagcagctgcccggtcaccggcgtcagattctggtaatactcgccgtcggcaggggctacccattcgccgccaataaagttgtcatagcgggcttttaacttgagggggaaaccatactcgccgggcttaatctgtgcactagggggattattggtcatgatcgtctccttgcggtgtgaggtataacaagggtagacgtgactggcgaaatcttcgccagtcggtaacagctttacgacagctatcacgaatttacgggcaagggttacagagatagttgaaaaagcggctaacaatttgccagccgttgtggaaatgatgattacatcgctgcgcgataaatcgccacaatttcttcgtgagttgcctggatcgggttagtaaagccacaggcatctttcagggcattagtcgccaataccgcgaaatcttcttctttcacgttcaggtcgcgtaggcctgccgggatatccactttcttcgccagttcacggatggcgttaatgcaggcttcagcaccttccgcgtcgtttttacctgtcacgttcacgcccattgcagcggcacagtcacgcagacgtgcagcggcgactttgctgttgaatacctgaacgtgcggcagcaaaacggcgttacatacaccgtgtggcaggttgtagaaaccgcccagctggtgcgccatcgcatgaacataacccagagaagcattattgaacgccataccggcgaggaactgggcataagccattgcttcacgcgctttcgcattactgccatcttcaacggctaacggcaggttttcggcaatcatggtcacggctttcagtgcacaagcgtcagtgatcggcgtggcggcaatagaaacatatgcttcgatagcgtgcgttaaggcatccatacccgttgcggcggtcagactcttcggcataccaatcatcagagaggagtcattgacagaaagcagcggagtgacatgtttatcaacaatcgccattttgatatgacgcgcttcgtcagtgatgatgcagaaacgggtcatttcagaggccgtacccgccgtggtattgatggcgatcatcggcagctgcggttttgcagagcggtcaacgccttcgtaatcgcgaatatcgccgccattggctgccaccagcgcaataccttttgcgcagtcgtgtggagaaccaccgcctaaggagatcacgctatcgcaattattctctttaagtaatttcaaacctgcggcgacgttttccgtggtggggttaggttgggtgccatcataaataacgctaaaaatattgcgttcttccagtgctttttgcacatcgcccgccatacctaatttcgttaacatattgtcagtgacaattaaggtacgggtaaatccataatctgccatcatattcattgcatcagtcaaactatcagcgccgatgacattcacagaaggaataaagaacgtactagctgccataacacactcctgaaagtgtaaaaaagggcgggcagcttactgaggattttcattcgaaaatatgatcagtattattgattatcaaaattaatctaataaaaagcacattgtattcattaaacaatgtgctttttttaaattcataagaattttgtattaatttattttaaaacttaattaatcatttccttatttttccggaaataataatgcgtcgcgcaataaatgatcatttccacgacgacgcgtaaagccaatgcggtcaaaatattccagaatctgaattgccagctttcggcctacgcctaagcgatcgcggaaatccgccgcgcaggtactaccacactcctgatcgagatcgcggatcatattggcaaactcgacaatccgatcgttacggtaataacgatctttaacgatcgcggtaattattccttgctgcgccgcctggcgtagagtcaggcgcattgcctgctcgtcggttcccgtctcttttgccaggtcacgcacccaccacggttcgtcaccaaacagtggctctgctttttgccagatggcctgctgctcttcgctgaagcccgctttgtgatctggcagatgcagccagccgtgatggctgtggatgtcgccgctttcgcgcatcttttcaatcagcaacagtaccagcgcttcatcttccattggcaacgccatacgtcgcagacgttcgcgcccagggccaggttcatcgcgatgttgctcatgataagtcgctaatgtgtcgagaattttccgctgccagcgggcggcaaccggcgcattcaacaagctataaccagcctgaatataaccaggctgttgcagcaattcgcgcatcccttcgccgttgagctggcgcgcccaggcgaaatccgcaaggttaaccgcgccgcgttccagatgaacagataacgcatcggcatcgctctgcgcccgtgcaagagacgccagccattgcagatattccggcttacgtttaccgcgacgcggcgggttaagcatcacgacgcgcgctccggccagcgtgttgcgggcagagatatcgcgcaataccaggcggtcgttatctgccagccataacggggtgtcgaagaccagttcagcaaggttatcttccagcagactaacgcgtcccgtgacgtggctggcggcgtggtgaatatgcagcggctgccactgggtcagcggtgtatgggtttgaagctcgacaatcacccgtgtgaacggctctggcggcacatcggcaagcagccagtcgccacggttaatctgctctttttccgcatcacccgcgatgttaagcgcgatacgctgcccggcattggcggtttctgttggctggttttgcgcatgcagcgcacgtacacgcatcggtttatttacaccagtcagccagagactatcgcctaccttcacttccccgcttaacgccgtaccggtgacgaccagcccggcaccttttacggtaaatgcgcggtcaatcgcgaggcggaaactatgttggctggcgtgctcgcgttccggcaactgaagcagatgctcgcgcagggcatccattccccgaccttcggttgctgcggtgataaacagttttgcctcagcaaaaccgtattcccgcagaacctcctttacctggcgttcaacctcatcaacacgcgcttcgtccacgcgatcggctttggtcagcgccactgtcagcatcgggttaccggtcagctgcaaaatcgccagatgctcacgggtctgtgccatcacgccgtcatcgcacgccaccaccaacagcgcgtgatcgataccaccaacgcccgccagcatgttggaaagaaacttttcatgaccgggaacgtcgataaaaccaggcacgcgaccatccggctgcggccagtaggcatagccgagatcgatggtcatgccgcgctttttttcttccggcagacggtcagcatttacgccagtaatcgcctgcaataaggttgttttgccgtggtcaacgtgtccggcagtcgcaataatcatttcaacaacatctccaaaaaccgttgctcatcttcaaggcagcgtaaatccagccacaatcgtccgtcataaatacgaccaatcaccggcactggcaattcacgccagcgggcggctaaactctcaaggtggctaccgcgtccatcatggggtgtaaacgttaatgccgcgctcggcaggcgatcaaccggcaggctaccactgccaatctggctaagacatggcataacctgtaccgcaaactccgcgccgtaatgtgcggcaaggggggcctgtaaacgttgtgcctggatttgaatgacctctgcgctgcgggtaagcaggcgcagggtcggtaatttttcactcagagcttcagggtgtaaataaagacgcaacgtggcttccagcgccgcgagggtcattttatccgcgcgtaatgcacgcttcagcgggtggctttgcaggcgggcgatcatctcttttttaccaacaataattcctgcctgcggcccgcctaacaacttgtcgccggagaaactcaccagactgacgcccgccgcaatcaactcctgcggcattggctctttcggcaaaccgtactggctaagatcgaccaggctgccactgcctaaatcagtcactacgggaacatccagctctttgccgagcgccaccagttccgcttcatctatcgctttggtgaacccctgaatgctgtagttactggtatgtactttcatcaacagtgcggtattttcattcaccgcctgacgataatcattcgcgtgcgtgcggttggtggtccctacttcgtgtagggtgcagcctgcctgacgcataacatcgggaatacgaaacgcgccgccaatctccaccagttcgccgcgagataccaccacctcttttccgctggcagtggccgccaacatcaataacaccgccgccgcattgttattgacgatacaggcatcttccgcccccgtaatacggcacagcagctgcgccagcgcccgatcgcgatgtccgcgtccggcgtcgtccagatcatactcgagggtcactgggctacgcatagcctgcgcaacggcttccaccgcggcttccgcctgtaaagctcgcccaaggttggtatgcagcacggttcccgtcaggttgatcaccggacgcagcgcgctctgcgcttctttcgtcaaccgggcatcgacttcttgcgcccagttttcacaccacgcaggcagcgtctggctgccacgaatcacttctcgcgcttcgtcgagcatctgacgcaacaattccaccacgcgggtgtgaccataagtatcacgcaaagaaaggaaggagctatcgcgcaataagcgatcaatagccggaagttgactatagagggaacgcgtttcggttgtcataggaaacctggctgatcaaggccctctcacacggagaagggcgtttaacataaccacggattgtaacgtgagatgggtcaggaggacatatcgcgcatcaagcctttggcggttcggtgcgagcaaaactttcgcggctaaacaggttttcgaccagtttgactaagtgtgggcggtcgacacaccaacctggcgcaacgcggcggaaattgagatatccgacggcacaggcaatggcgatagtcgccagattgaccgtatcggttttgagtgtgccatcgaccagatatccttccagcacatccagactgcggttgattttctcccgctggcgtaacaattcatcttcagactgctgcgccgctggacgcgcctgttcacgcacgcttaccagcccggcatccataatgccatccgccagtgcctcaattttgcgcacccgcaagctctccagcggatcgcgcggcaacatcgccggagcgacattcattaattcaatatattcagcgatgatcgggctatcaaaccagcattcgccctcttcggtcaccagcaccggcacttttcctaacgggttaaattgcgccacgccgttgtccgcgttatagggcagttcattaataaattcgaaagttatgcccttttctaacaacagaatagaaagtttgcgtacaaacgggctggtgtagctaccgacgagtttcatgccgagtcctttgtgcgaggaaaaatatcagtatggctcaatgatccaaataaagataatgcatccagctggtcattcttagcagcactttccgcatcacgctaacatggctgaaatggtcggagtaaaccgccacctgggcgtagatgccgtcgggtaaggcatcgatatcatcgttagggtccagttcaatggttcccagcacaccgtccgtgccgggcacgaccgttaaactttgcaataccccctgcgcctgataagaaccgcctggcacgacaggtaaaatactagtcagtttgccgtgaaacacctgcccaggtagcgcgttaaacaccacttccgcatcatcgccaggtttcagacgtaacaggctgttttgccgaaattgggcgacaatttgccgtttttgctcggggatgaagaccatcaccggacgcagcggcaaggcagctgcgtatgtacctgggcggatcagtacctgagtaacgtagccattgctcggcgcgcgaatgacagtctgctcaaggttatattttgcttcagtaagttgcgctcttaagctcacaatctggctttgctcgccgttaaccatactgtcgagctggctctggatctgcgcctgctccgccacgctgcctttcaccagcgcatcctgcgcgaggaaattttgccgcgcatcgtcgatgtcacgttcgctgaacggattcaccgccgcctggctgcctttcaagtaacgttgataatttttaaacagacggtcgcgctccgcactaacctgggtggtgttggcctgcgcttcagtgagctgcgcacgcagcgtctttatattatgcgtcgccgtcatcaggtcagcctgaagtctgtcaactcgcgcctggtaacgaaccgggtcgagcttaaaaagcacctcgcccttttgaataagctgattattcttgtcagtgacttcagtaacaattcccgtcacctgtggcgtgatagggatcgctatcactgccttttgcgcggtaaaagtgtaagggtggttgtagttcatcaacaaaatcaaaccactcaccagaaacacgcctcccagcgccgccgtcgccagcgtccactgatttaccggaatgcggaagattttaaagaccgcccacgccagcgccacgtaagttaaaacaatcaatagatccataattagatctccgggaacgtggaatagtcagtctttttctcggcggcgagttgatgctccaaccgggaaattcggtcagaaagtgcggcgatttccgggtcagtcgctttctcctggctcgcaacatgactctgcataccccagccacgctccggttgatagagcgtcgcccagatccacagaaacggccagataacatgcagagtaaacaggctcacccagcccgccgtatgaatagcgtcggcatggggatggttgcgctttttggcaatcagataagggatgtcatgtatcgcgatgattccataaaaaatcaccagaaagacgaagatcagcactcccaacgcgaaatagtttagaaacatatctgcctcggattcacgtttatcagtgttgtttttgggctggcagccagaagggagtcaggctgatattttgacaataatccgggttcgcgattctcgccataacaccaaagaataatttttagaggtgatgagttgcttagttacataacgattgtatgacgaaggcataacatgctgtagatcacatcaggtgaacgccgtaagaaaatatcttgtgattcagatcacaaagattcaacaaaccatcaaaacaaaaatgtgacactactcacatttaaatgccatttttagcgaaaatcgccgccttgttgcttttttacacaagcgttttgtgatgaacgtcacgtcaattacctctctaccccctatatttatgtgattgatatcacacaaaaggccgtcgactggacagttaaccgattcagtgccagatttcgcagtatctacaaggtccggctacctctgccgccacattaacaaaaaacctcgggcttccagcctgcgcgacagcaaacataagaaggggtgtttttatgagttccgatattaagatcaaagtgcaaagctttggtcgtttcctcagcaacatggtgatgccaaatatcggcgcgtttatcgcgtggggtatcatcaccgcgttatttattccaacagggtggttaccgaacgagacgctggcgaagctggtcgggccgatgatcacttatctcctgccgctgctgatcggttataccggtggtaagctggtaggcggcgaacgtggcggcgtagtcggtgccatcaccaccatgggcgttatcgtcggcgcagacatgccgatgttcctcggttctatgattgcaggtccgctgggcggctggtgcattaagcacttcgaccgctgggtagacggtaagatcaaatccggttttgagatgctggtgaataacttctccgcaggcatcatcgggatgatcctcgctattctggcattcctcggcattggcccgattgttgaagccctgtccaaaatgctggctgcgggcgttaacttcatggttgtccatgacatgctgccgctggcgtctatctttgttgaaccggcgaaaatcctgttcctcaacaacgccattaaccacggtatcttcagcccgctgggtattcagcagtcccatgaactgggtaaaagtatcttcttcctgattgaagctaacccaggtccaggtatgggcgtgctgctggcgtacatgttctttggtcgtggtagcgctaaacagtctgcgggcggtgcggcaatcatccacttcctggggggtatccacgaaatctacttcccgtatgtgctgatgaatccgcgtctgatcctcgcagtcatcctcggcggtatgactggcgtgttcacgctgactatcctgggcggtggtctggtttctccggcatctccgggttctatccttgctgtactggcgatgacaccaaaaggtgcttacttcgctaacatcgcgggtgtgtgtgcggcgatggctgtctccttcgttgtctctgctattttgctgaaaaccagcaaagtgaaagaagaagatgatattgaagcagcaactcgtcgtatgcaggacatgaaagctgagtctaaaggcgcatctccgctgtctgctggcgatgtgactaacgacctgagccacgtacgtaaaatcatcgttgcctgtgacgccggtatgggttccagtgcgatgggcgcaggcgttctgcgtaagaaaattcaggatgcaggtctgagccagatttctgttactaacagcgcgatcaacaacctgccgccagatgtggacctcgtcatcactcaccgtgacctgaccgaacgcgctatgcgccaggttccgcaggcacagcatattagcctgaccaacttcctcgacagcggcctgtacaccagcctgaccgaacgtctggttgctgcccaacgccacacggcaaacgaagagaaagtaaaagacagcctgaaagacagctttgacgattccagtgctaacctgttcaagctaggcgcggagaacatcttcctcggtcgcaaagcggcaaccaaagaagaagcgattcgttttgctggcgagcagctggtgaaaggcggttacgttgagccggaatacgttcaggcgatgctggatcgtgaaaaactgaccccgacttatctgggtgagtctatcgcggtgccacacggtacggttgaagcgaaagatcgcgtactgaaaacgggcgtcgtgttctgccagtacccggaaggcgtgcgcttcggtgaagaagaagatgacattgcccgtctggtgattggtattgctgcccgtaacaacgagcacattcaggttatcaccagcctgaccaatgcactggatgatgagtccgtcatcgagcgtctggcacacaccaccagcgtggatgaagtgctggaactgctggcaggtcgtaagtaatccaatcccaccctctccacatggagaaggtggggttaattgcctgatgcgctacgcttatcaggcctacaggatgcatcacaatttgttgaatttgcacgttcttgtaggccggataaggcgcttacgccgcatccggcgctgcccctctcctcacggagagggtttgggtgagggaaaagcctcaccccagccctctcgggtaaaaacattgatgaaggttaatactatgaaagcattacattttggcgcaggtaatatcggtcgtggctttatcggtaaactgctggcagacgcgggtatccaactgacgtttgccgatgtcaatcaggtggtacttgatgccctgaatgcccgtcatagctatcaggtacatgtggttggtgaaaccgagcaggtagataccgtttccggcgtcaatgctgtcagcagcattggtgatgatgtcgttgatctgattgctcaggttgatttagtcactaccgccgttggcccggttgtgctggaacgtattgctccggcaatcgccaaagggcaggtgaaacgtaaagaacaaggtaatgaatccccgctgaacatcatcgcctgtgaaaacatggtacgcggtaccacgcagctgaaaggccatgtgatgaacgccctgccggaagacgccaaagcgtgggtagaagaacacgttggctttgtcgattccgccgttgaccgcatcgtaccgcctagcgctagcgcaactaacgatccgctggaagtgacggtagaaaccttcagcgaatggattgtcgataaaacgcagttcaaaggcgcactgccgaacatcccaggcatggagttaaccgacaacctgatggcatttgtcgaacgtaaactcttcaccctgaacacgggtcatgctataaccgcgtacctcggaaaactggccggtcatcagaccattcgtgacgcgattctcgacgagaaaatccgcgcggtggtaaaaggtgcgatggaagaaagtggtgcagtattgatcaagcgctacggctttgacgctgacaagcatgcggcgtacatccagaaaattctcggccgttttgagaacccgtatctgaaagatgatgtagagcgcgtaggccgtcagccactgcgtaaactgagtgctggtgaccgtctgatcaagccactgctcggtacgctggaatatggtctgccacataaaaacctgattgaaggtattgccgctgcaatgcacttccgcagtgaagatgatccgcaggctcaggaactggcagcactgatcgctgacaaaggtccgcaggcggcgctggcacagatttccggtcttgatgccaacagcgaggttgtatccgaggcggtaaccgcttataaagcaatgcaataatggtggaccaggcgcaggacaccctgcgcccgaataacagattgagtgatatgcaggcaacaatggaacaaacccaggcctttgaaaaccgtgtgcttgagcgtctgaatgctggcaaaaccgtgcgaagctttctgatcaccgccgtcgagctcctgaccgaggcggtaaatcttctggtgcttcaggtattccgcaaagacgattacgcggtgaagtatgctgtagaaccgttactcgacggcgatggtccgctgggcgatctttctgtgcgtttaaaactcatttacgggttgggcgtcattaaccgccaggaatacgaagatgcggaactgctgatggcattgcgtgaagagctaaatcacgacggcaacgagtacgcctttaccgacgacgaaatccttggaccctttggtgaactgcactgcgtggcggcgttaccaccgccgccacagtttgaaccagcagactccagtttgtatgcaatgcaaattcagcgctatcaacaggctgtgcgaagtacaatggtccttagtctgactgagctgatttccaaaatcagcttaaaaaaagcctttcaaaagtaagcaacgtctgcttactgcccctctacctgcttcggccgataaagccgacgataatactccagacgttgtagatataacggcacgctttcatcgggtattccggacggaatcgcgttacggggaggaagttttttcagatactcccggaacgcctggctacttgccatgaaatctacggctttatcgataagaagcggaacgttttcacctaatttgcccatgatgatatctccgtattaccccgcgccgggaatgcgcggccgccaattttagtttaggttcccggtaaagatgacattaaggaaaacgtgctgaatcctcaataatcatccgctgctgtttattatcttttttctatagatttcttaattaatcaacgaattgcgcagtttttgagcatgttaatgattacgttacagaactattacaatgtcattagttgtgaacaaagcacctggtcgcgcatactaggggctataaatttatctttatcagaagccatcacatgaaagaagtcgaaaaaaacgaaatcaaacgcctcagcgatcgcctggacgccatccgccaccagcaggccgatcttagcctggttgaagccgcagacaaatatgccgagctggaaaaagagaaagccacgctggaagcagaaattgctcgcctgcgtgaagttcatagccaaaaactgagtaaagaagcacagaagctgatgaagatgccattccagcgcgcaattaccaaaaaagagcaggctgatatgggcaagctgaagaaaagtgttcgcggactggtcgttgtgcacccaatgaccgcactgggccgcgaaatgggcctgcaggagatgactgggtttagtaagaccgcgttttaagaacacagtatctacagggtgattctgcacattcctataggccgagtaaggtgttcacgccgcatccggcaagataaggcgctctggatcaacaacctaagggcaattctctgatgaggattgcccttttctttaccagacatctccccccacaagaattggccctaccaattcttcgcttatctgacctctggttcacaatttcccaattaaaactcacatcaatgttgccaatacataacatttagttaaccattcattgtcattatccctacacaacacaattggcagtgccacttttacacaacgtgtgacaaggagatgagcaacagactcattacacgatgtgcgtggactccaggagacctgcaatgaatctctggcaacaaaactacgatcccgccgggaatatctggctttccagtctgatagcaagccttcccatcctgtttttcttctttgcgctgattaagctcaaactgaaaggatacgtcgccgccagctggacggtggcaatcgcccttgccgtggctttgctgttctataaaatgccggtcgctaacgcgctggccagcgtggtttatggtttcttctacgggttgtggcccatcgcgtggatcattattgcagcggtgttcgtctataagatcagcgtgaaaaccgggcagtttgacatcattcgcagctctattcttagcataacccctgaccagcgtctgcaaatgctgatcgtcggtttctgtttcggcgcgttccttgaaggagccgcaggctttggcgcaccggtagcaattaccgccgcattgctggtcggcctgggttttaaaccgctgtacgccgccgggctgtgcctgattgttaacaccgcgccagtggcatttggtgcgatgggcattccaatcctggttgccggacaggtaacaggtatcgacagctttgagattggtcagatggtggggcggcagctaccgtttatgaccattatcgtgctgttctggatcatggcgattatggacggctggcgcggtatcaaagagacgtggcctgcggtcgtggttgcgggcggcagctttgccatcgctcagtaccttagctctaacttcattgggccggagctgccggacattatctctagcctggtaagtctgctctgcctgacgctgttcctcaaacgctggcagccagtgcgtgtattccgttttggtgatttgggggcgagtcaggttgatatgacgctggcccacaccggttacactgcgggtcaggtgttacgtgcctggacaccgttcctgttcctgacagctaccgtaacactgtggagtatcccgccgtttaaagccctgttcgcaagcggtggcgcgctgtatgagtgggtgatcaatattccggtgccgtacctcgataaactggttgcccgtatgccgccagtggtcagcgaggctacagcctatgccgccgtgtttaagtttgactggttctctgccaccggcaccgccattctgtttgctgcactgctcagcattgtctggctgaagatgaaaccgtctgacgctatcagcaccttcggcagcacgctgaaagaactggctctgcccatctactccatcggtatggtgctggcattcgcctttattagcaactattccggactgagtagtacactggcgctggcactggcgcacaccggtcatgcattcaccttcttcagcccgttcctcggctggctgggggtattcctgaccgggagcgataccagttctaacgccctgttcgccgcgctgcaagccaccgcagcacaacaaattggcgtctctgatctgttgctggttgccgccaataccaccggtggcgtcaccggtaagatgatctccccgcaatctatcgctatcgcctgtgcggcggtaggcctggtgggcaaagagtctgatttgttccgctttactgtcaaacacagcctgatcttcacctgtatagtgggcgtgatcaccacgcttcaggcttatgtcttaacgtggatgattccttaatgattgttttacccagacgcctgagtgacgaggttgccgatcgtgtgcgggcgctgattgatgaaaaaaacctggaagcgggcatgaagttgcccgctgagcgccaactggcgatgcaactcggcgtaagtcgtaatagtctgcgcgaggcgctggcaaaactggtgagtgaaggcgtgctgctcagtcgacgcggcggcgggacgtttattcgctggcgtcatgacacatggagcgagcaaaacatcgtccagccgctaaaaacactgatggccgatgatccggattacagtttcgatattctggaagcccgctacgccattgaagccagcaccgcatggcatgcggcaatgcgcgccacacctggcgacaaagaaaagattcagctttgctttgaagcaacgctaagtgaagacccggatatcgccagtcaagcggacgttcgttttcatctggcgattgccgaagccagtcataacatcgtgctgctgcaaaccatgcgcggtttcttcgatgtcctgcaatccagtgtgaagcatagccgtcagcggatgtatctggtgccaccggtttttagtcaactgaccgaacaacatcaggctgtcattgacgccatttttgccggtgatgctgacggggcgcgtaaagcaatgatggcgcaccttagttttgttcacaccaccatgaaacgattcgatgaagatcaggctcgccacgcacggattacccgcctgcccggtgagcataatgagcatagcagggagaaaaacgcatgattatttccgcagccagcgattatcgcgccgcagcgcaacgcattctgccgccgttcctgttccactatatggatggtggtgcatattctgaatacacgctgcgccgcaacgtggaagatttgagtgaagtggcgctgcgccagcgtattctgaaaaacatgtccgacttaagcctggaaacgacgctgtttaatgagaaattgagcatgccggtggcactggctccggtgggtttgtgtggcatgtatgcgcgtcgtggcgaagttcaggcagccaaagcggcggacgcgcatggtattccgtttactctcagcacggtttccgtttgcccgattgaagaagtcgcgccagccatcaagcgcccaatgtggttccagctttatgtactgcgcgatcgcggctttatgcgtaacgcgctggagcgagcaaaagcagcgggttgtagcacgctggttttcaccgtggatatgccgacaccgggcgcacgctaccgtgatgcgcatagtggtatgagcggcccgaacgcggcaatgcgccgctacttgcaagcggtgacacatccgcaatgggcgtgggatgtgggcctgaacggtcgtccacatgatttaggtaatatcagtgcttatctcggcaaaccgaccggactggaagattacatcggctggctggggaataacttcgatccgtccatcagttggaaagaccttgaatggatccgcgatttctgggatggcccgatggtgatcaaagggatcctcgatccggaagatgcgcgcgatgcagtacgttttggtgctgatggaattgtggtttctaaccacggtggccgccagctggacggtgtactctcttccgcccgtgcactgcctgctattgcagatgcggtgaaaggtgatatagccattctggcggatagcggaattcgtaacgggcttgatgtcgtgcgtatgattgcgctcggtgccgacaccgtactgctgggtcgtgctttcttgtatgcgctggcaacagcgggccaggcgggtgtagctaacctgctaaatctgatcgaaaaagagatgaaagtggcgatgacgctgactggcgcgaaaagcatcagcgaaattacgcaagatagcctggtgcaggggctgggtaaagagttgcctgcggcactggctcccatggcgaaagggaatgcggcataatcgtttgcgccccctcaccctaaccctctccctcagggagaggggaccgttcggcgctgtatgtactccctcactctgaaacgacaccgcactctttttttctccctcgcccctccggggagagggccggggtgaggggaaaaggccgcactgctcaccaattttctgctatcctgcccccgcactaagggggcagtatgctaaacatcgtactttacgaaccagaaattccgccaaatactggcaacatcatccgtctttgcgctaataccggctttcgtctgcatatcatcgaaccgatgggatttgcctgggacgataagcgcctgcgccgcgcggggctggactatcacgagtttaccgccgttacgcgtcatcatgactatcgcgcgttcctcgaagcagaaaatccccagcgcctgttcgccctcaccacgaaaggtacacctgctcacagcgccgtaagctatcaggatggcgattatctgatgttcggcccggaaacacgcggcctgccagcgagcattcttgatgccctgcccgctgaacaaaaaattcgcattccgatggtgccggacagccgcagcatgaatctgtccaatgcggtgagcgtagtggtgtatgaagcctggcggcagttggggtatccgggagcggtattgagagattaattactgtaggccggatagatgattacatcgcatccggcacgatcacaggacattagatcccatccccatactcaaatgtatggttaataccgttgaaatgctggtccatatccatacttggcttatcgctgtctggtttaccgacaatacgagccggaacgccagcggcggtggtatgcggcggcaccggttgcagcaccacggaacctgcgccaatcttcgcgccgcgcccaacttcaatattgccgaggattttcgcgcccgcgccaatcatcacaccttcacgaattttcgggtgacggtcaccaccagatttacccgtaccgccaagcgtcacagattgcagaatgcttacgtcgttttcaatcaccgccgtttcaccaacgacgatgcctgtcgcgtggtcaagcatgataccgcgaccaatttttgctgccgggtgaatatcgacctggaacgtcacagaaacctggttttgcagaaagattgccagtgcgcgacgcccctgattccacaaccagtgaccgatgcgataggcctgcaaggcatgaaaacccttcaggtataacaacggggtactgtatttatcgactgccgggtcgcgggtacgcaccgcctgaatatcacaggccgcagaggcgatcatttccgggtcagcggcgtaggcttcttccaccacttcacggatagcaatagcaggcataattgggctactcagcttgttcgccagcatgtagctcagtgcactgccaaggttttcgtgcttgagtagcgtcgcgtggtaaaaactggccagcattggctcacagtccgccagcgttctggcttcggctttaatattgttccagacaatttccagttcttcacagctcattgcttactccacacgatgagataatgaccggcccgttctgcgcgggccgggtcatagcggtaacaaaggttccctggggttagtggctgctgcgctcgtccttgcgtgcacgacctagtaaagtcaatgctgcctcgcgcgcgttttttccgcaatataatacttgataaatttcctcggttattggcatttcaacgccgaagcgatgcgccagttcgcggacttctttcgtattgcggtagccttccaccacctgaccaatcttctcctgcgcgctttgtacatccatgccctgaccgagcatcatgccaaaacggcggttacggctctggttgtcggtacaggtaagcaccagatcgccaagccccgccatgcccataaaggtggcagggtcggcacccagcgccgcaccaagacggctcatttcagccagcccacgggtgatcagcgccgtacgcgcattcgcaccaaaaccgataccgtcggacatccccgcaccaatggcaataacgtttttcaccgcgccgccaagctgcacgccaatgaaatccggattgctgtaaacgcggaaacttttgccgcagtgcagcagctgctggagatcatcggcaaaggtctgatcggtgctggccaggctaatagctgtcggtaaacctgccgccagttctttcgcaaacgttgggccagagataaccgccagcggaatttgatcgcctaaggcctcacgcgccacgtcctgtaacagacgtccggtttccgcttccagccctttggtcgcccacaccagacgcgcatcaggacgcatcagtggtttaatctggcgcagcacttcaccaaagacatggctgggtacgacgacgagaatattacggctggctgccagcgcagtggcgagatcgctttcaagatggagcgtatcgggaaaaggcacatcggggagaaacgcggcgttacagcggtcgcgttcaagcgttgcgatatgttcagggtcatggccccagaggacaacctcgtggccatttcttgccagggtgatggcaagagcggtgccgtagctgccggcaccgatcacagtcatactagcattacgttggttcatcaggcatcctgatgttcttcagtaccttcgccagcctgctgctgcaaatagttcatgaacagcgcatcgaagttaaccggcgcaaggttcagttgcgggaatgtaccgcgggataccatgctggtgatgcactcacgagcatacgggaacagaatgttcgggcagtatgctcccaggcaatgcgccatctgggtgccttcgatacccgcgatggagaaaataccgccctgctgaacttcacacaggaacgcggtttcttcgcccaaagaggccgttacggtaacacgcagtaccacttcgtatacgtcatctgccagttgggaagatgccgtatccagatcaagtttaacttctggttgccaatctttctggaaaacgtgcggcgcgttcggcgcttcgaaagagatatccttggtataaatacgttggatctggaaagtcatttcagtgttgttttgttcactcatgtgtagaaaacccttaagtgttgtccttaaatactgcgcaatgtaatgccaacgttcacacgttatttcagcaggggatccagtccaccacgtgcatccaatgcatacaagtcatcacagccgccaatgtgctgtgcgtcaataaaaatctggggaaccgtggtgcgaccgctgcgtttgatcatctcttcacgcttggcggcgttgccatcgatcggcagctcctggaaactcacgcccttgctgctcagcagtgcttttgcacgatggcaatacgggcaggtttctttggtatagatttcaacattggccataaattagctcctgtttttttaccctgaaatttcatgttgcagggcggcagcaaaatggagtgtccccagaagcttataacaataagtcgctgggggcctaattgcagctaacggcctgcatcatgaaagacgacaggtaaattatttgccgcgcaccaaaggcaagttttcgccagcccagccagcgacgccttctttcagcacgaatacttgcgcaaaaccagctttcgtcagtgcgtttgcaggctcctggcactgcatgccagaaccgtctaccacgataaccggtttgtctttgtgcttctcaagctcaccaacattgttggctttgatttcgctcggcaacagattaatagaacctgcgatatggcctttacggaagtcatcacgctgacgtaaatccacaaccacagcgtcttctttgttgatcagacgcgtagcttcaccacgagtaatcaccttcactttgctggtcaggctcttaaacgtagtcacaagaaccgccaccagtaacgcgatccaggcgatactcagtatgggatgacggccaacaaattgcataatttcttgcatggggggtaacaactcccgacgtagtgattaaaaaaaccaggaaaggagtatacctgcgcggtgcggcaaatacagccagcgcgttaactggaatgcaattttgcggggcgcgacgaaaaaaaagcgtaaatctggcatcggcttgccgcgagcggtcgtatattttgatcttcagaggctattttatcgattcagctgtagtaaaattacgcaaattttgactcttgagtatgaggttgtcgcaatgttggtttctaaaaaacctatggtactggtgattctggatggctatggctatcgcgaagaacagcaggataacgccatttttagtgctaaaaccccggtaatggatgcactgtgggccaatcgtccgcataccctaatcgacgcttccggtctggaagtcggtctgcctgaccgtcagatgggtaactccgaagtaggccacgttaacctgggtgccggccgcatcgtgtatcaggacctgactcgtctggacgttgaaatcaaagatcgcgctttctttgctaatccggtgctgactggcgcggtagataaagcgaaaaacgcaggcaaagcggtacacattatgggtctgctctccgcaggcggcgtacacagccacgaagatcacatcatggcgatggtagaactggcagctgaacgcggcgcagaaaaaatctacctgcacgcattccttgacggtcgcgacactccgccgcgcagtgctgaatccagcctgaaaaaattcgaagaaaaatttgccgcgctgggcaaaggccgcgtagcgtccatcattggtcgttactacgcgatggaccgcgataaccgttgggatcgcgtagaaaaagcttatgacctgctgactctggcgcagggcgagttccaggccgataccgccgttgctggtttgcaggctgcttatgctcgcgacgaaaatgatgaattcgtgaaagcgaccgttatccgtgctgaaggtcagccagacgcggcaatggaagacggcgatgcactgattttcatgaacttccgtgctgaccgcgcgcgtgaaatcactcgtgctttcgtgaacgctgatttcgatggcttcgcgcgtaagaaagtggttaacgtcgatttcgtgatgctgaccgaatacgccgctgacatcaaaactgcggttgcttacccacccgcttccctggttaacaccttcggcgagtggatggcgaaaaacgacaaaactcagttgcgtatttccgaaaccgaaaaatatgcccacgttactttcttcttcaacggtggcgtagaagagagcttcaaaggcgaagatcgcattctgatcaacagtccgaaagtggctacctacgatctgcaaccggaaatgagctccgcagagctgaccgaaaaactggttgcggccatcaagagcggcaaatacgacaccatcatctgtaactatccgaacggcgacatggtaggtcacaccggggtgatggaagcggcggttaaagcggttgaagcgctggatcactgcgtggaagaagtcgcgaaagcggttgagtccgtgggtggacaactgctgatcaccgctgaccacggtaacgctgagcagatgcgcgatccggcaacgggtcaggcacacacggcacacaccaacctgccagttccgctgatttacgttggtgataagaacgtgaaagcggttgaaggcggcaaactttctgacatcgcgccgaccatgttgagcctgatgggtatggaaatcccgcaagagatgactggtaagccgctgttcatcgtggaataatccctccccatgaggggaaaggcgattaataccatgacacgggccgtgaaaccgcgcaggtttgcaatcaggcccatcatctacgccagcgttcttagcgctggcgtattgttgtgcgccttttccgcccacgcggatgagcgtgaccaactcaaatctattcaggctgacatcgccgcaaaagagcgcgcggtacgccaaaagcaacaacaacgcgcaagcctgctcgcacaattgaaaaagcaggaagaagcgatctctgaagccacccgtaagctgcgcgaaacgcaaaacacgctcaatcaactcaataaacagattgatgagatgaacgcgagcattgccaaactggagcagcaaaaagccgcccaggagcgcagcctcgccgcacaactggatgccgcattccgtcagggcgagcataccggtattcagctgattctcagcggtgaagaaagccagcgtggacagcgtttacaggcttatttcggctatctcaaccaggcgcgacaagaaaccattgcccagttgaagcaaacgcgtgaagaagtcgccatgcagcgtgctgaactggaagagaaacagagcgagcaacaaacgctgttatatgagcagcgcgcccaacaggcgaaactgactcaggcgctgaacgagcgtaaaaagacgctggcagggctggagtcttccatccagcaaggtcagcaacagttgagcgagctgcgcgccaacgaatcccgtctgcgtaacagcattgcccgtgcggaagccgcggcgaaagcgcgtgcagaacgagaagcacgtgaggcccaggcggttcgcgaccgccagaaagaagcgacgcgcaaaggcaccacctacaaaccgaccgaaagcgaaaaaagcctgatgtcccgtaccggtggtctgggcgcgccgcgtggtcaggcattctggccggttcgcgggccgacgctgcatcgctatggcgaacagctacagggtgaattacgctggaaaggtatggttatcggtgcttctgaaggtactgaagttaaagcgattgccgacggtcgggtgattctggctgactggctgcaaggctacggtctggtggtggtggttgagcatggtaaaggcgacatgagtctttacggctataatcagagcgcactggtgagcgttggtagccaggttcgcgcgggccagccgattgcactggtgggcagcagtggcggtcagggtcggcctagtctctatttcgaaattcgccgccagggtcaggcggtcaatccacagccgtggttgggaagataagttttgtttccatttcgtcgtaacgttcttgcatttgccgctctgttggcgctctcctcccccgtacttgctggcaaacttgccatcgtcattgatgattttgggtatcgcccgcacaacgaaaaccaggtgctggcgatgccttccgctatctccgtcgctgtattacccgatagtccgcacgccagagagatggcgaccaaagcgcataacagcgggcacgaagtgttgattcatctcccgatggcaccgttgagtaaacagccgctggagaaaaatacgctacgcccggagatgagcagcgacgaaattgagcgcattattcgtagtgcggtcaataacgtgccctatgccgtggggatcaacaaccacatgggcagcaagatgacctctaacctgtttggtatgcagaaagtgatgcaggcgctggagcgttacaatctttacttcctcgacagcgtaaccatcggtaatacccaggcgatgcgcgccgcgcaaggcactggcgtgaaggtgatcaaacggaaggtattcctcgacgatagccaaaatgaagcggacatccgtgtgcaatttaatcgcgcaattgacctggcgcgtcgcaacggtagcaccattgccattgggcatcctcaccctgcaacggtacgcgtgttgcaacagatggtttataacctgccgccagacattacgctggtgaaagccagcagcttgctgaatgaaccgcaggttgatacttctacaccgccgaaaaacgctgtgcctgatgcaccgcgtaatccgttccgtggcgtgaagctgtgcaaaccgaagaaaccgatagaacctgtttatgctaatcgcttctttgaagtattaagcgaaagcatcagccagagcacgctgatcgtttacttccagcatcagtggcaaggctggggcaaacagcccgaagcggcgaagtttaacgctagcgcaaattaattagcgcaaattaaaggcgctacgcgtaatgcgatggtggctccgcgttttgtcgcgccattgccataagcggaaagaccacagtaacgcctggtaaccgaccttcacgctgcgcacattggtaatcaggcgcttatacataccggaagtaaatatctcggcaatcatccgttggcgggtaagaatatccggctctttgcgcaccgcatggcaaacacgcaatgcctcgtaagttatttgctgatgaaattccggataaatcataattttgtcggcataatttcgatttaatttctccagcaggcgggtaatcttaatatagtgacgttgataattaaggtttttattcccttgtctatgcaaccgactcacactcgtattatgcagataatatttatataaactttgctcggtatatcgcgcacgcagcgcgttaaacatgaattctgttgtccagacaatatcctgatgatgtaatccggcaataaatttaatgttatttttaacaataacatcacggcgataaacccccatccagacaacgtgagtccaacggcggctagaaagccccatccgcagccagtccgggccggttaatacgccggtactgcgaaggcgatcggtggggatggattgccaggtttctcccgtttcacgaaaacaccagtcagcgttgcactgcgccacgtcgaggtcgtcctctaacgccatggtcatcagcgtttcgtacatggtgggatagacttcatcgtcagcatcgacaaaagcgacatatttgcccgttgccacttcaatcccacgattacgcgccacgcttgcgccagcattcgcctgatgcaacaaacgaacgtgcggatagttttctgcgtaatactttgctatttcaacagaattatccgtactaccatcgttaataataatgatttccagagcagtccaggtttgcgtaattaaagattccatacaagtgcggaaatcatcgcccgcattatataacggaataataacactaagtttattggtgctgttcatcataaattaccgacgacctctgaagttatcctgacgttttacaggctttgtattaagaaactattaagcctgtgagatattatttttacaggtgagagagtcacttcagggtagagagataatgagagcagctatataagagatcagcacaattacgaactctttattacactgacaggattttacatatttaacagattatcctcagataaaagggctggaataccagcccttgttcgtgttaatcccagctcagaataactttcccggactggccgctacgcatagcgtcaaagcccttctggaaatcatcgatagagaaacgatgggtaatgatcgggctaagatcgaggccagactgaatcagcgccgccatcttgtaccaggtttcaaacatctcacgaccgtaaatacctttaatgaacaagcctttaaagatcactttggtccagtcgatagacatatcagacggcggaatacccagcatcgcaatacggccgccgtgattcatggtgtcaagcatggtacgaaacgctggcggcgcaccggacatttccagaccgacatcaaaaccttcggtcatgcctaactccgccatcacgtcattgagattttctttggcgacgttaaccgcacgggtgatacccattttacgcgccagctcaaggcggtattcgttaacatcagtgatcaccacattgcgtgcaccaacgtgtttcgccaccgccgctgccataataccaatcgggcctgcaccagaaaccagcacatcttcgcccaccagatcaaagctcagcgcggtatgcacggcgttaccgaagggatcaaaaattgcggctaagtcatcggaaatattgtcggggattttgaaggcgttgaatgccgggatcaccagatattcggcaaagcagcccgggcgattaacaccaacgcctatcgtgttgcggcacaaatgggtacgaccaccacgacagttgcggcaatgaccacaggtgatatggccttcgccagaaacgcgatcgccgatcttgaagcctttcacttcctgaccaatacctaccacttcaccgacatattcatggcccacgaccatcggcaccgggatggttttttggctccactcatcccagttatagatgtgaacgtcagtcccgcagatggctgttttacggattttaatcagcagatcgttatgcccgagttccggtacaggaacgtcggtcatccagatgccctcttccgctttcagtttggataacgctttcatctcacatcctcaggcgataacgcccagttgtttaccaatacgcgtaaatgcttctactgcacgcgtaatttgctcaggggtatgcgccgcagacatctgggtacgaatacgcgcctgacctttcggaacgaccggatagaagaaaccggtaacgtaaatgccctctttttgcagctcacgggcaaatttctgcgccactaccgcatcaccaagcatgaccggaataatggcgtgatcggctcccgccagggtaaagcccgccgcgctcatttgctcacggaactgacgcgcgttcgcccacagacggtcacgcagttcgctgcccgcttcgaccatctccagtactttgatggacgcggcaacaatggccggtgccaggctgttggagaacaggtacggacgagaacgctggcgcagccactcaaccacttctttgcgcgccgcggtataaccaccagaagccccgcccagcgctttaccaagcgtaccggtgataatatcgacccggcccatcacatcgcagtattcatgggaaccacgaccattttcaccgacaaaaccgaccgcgtgggagtcgtctaccatcaccagggcatcatatttatctgccagatcgcaaacgcccttcaggttggcaatcacgccgtccatactgaacacaccatcggtggcgatcagcacatgacgcgcaccggcttcacgcgcttctttcagacgtgcttccagctcctgcatatcgttgttggcatagcgatagcgtttagctttgcacagacgcacaccatcaataatagacgcgtggttcagtgcgtcggagataatggcgtcttccgcacccagaagcgtttcaaacaggccaccgttagcatcaaagcaggaagagtagagaatcgcatcttccatccccaggaaggccgccagtttttgttcaagctctttatggctgtcctgagtgccgcaaataaaacgcacgctagccatgccgaaaccgtgagaatccattcccgcctttgccgccgcaatcagatcaggatgattcgccagcccgagatagttgttggcacaaaagttaatgacgtggcttccatcagccacagtgatatctgcttgctgcgcagacgtaataatgcgctcttctttaaacaacccttccgcccgtgcggtttccagatcgttggttaactgctgataaaattctccacgcattgcgattctccagacagggcaaattccagcacatattacccaaacttataggtcgcgacgagataacgcgttaacacttctgcaaaattcaggataaataacgtgtaacttgatgtctctcaacacctacagatagtagaaaaactgtacagttttggctgggcataatgatgattgattttactgcattgatataaaaagaaaaaatgatgccaaagcatcatttttcctatctcagttggtatcaaaacgctacccactaatggagggaaacttattttctactaaggaaaattctcagcgcctgcatttttgcccctaaagtgttactcctgaagcagcgaaacaaatcgaaccattttcctctccccagatagtttaggttgaagagatcggggcgtttgtaatagcacatgacaaaaatgccctggtcatcgtccacaatgttattatttagtgttattttttgactttccagaactaatttatagaattctttccatttatgctgactaccaacaattgcgcccccaataatatatacatgattgccaatcatgaaatcaaaaacctgttgttgagatgtgacagtaagccctttttttatagtgaaaagatgcatcttactttcatcaaatgggaaatcccaaattttcaatcctcgagttacatttggcttatggcaatagccaaaatctatccacgcaacaagaggcgttttcactaagcccatgttgatagctttatttacaaaataggccttaaggttacataccaaaacatactctggactccagtactctgggttttttaattgtcgaggctcaagtctatttgtaaagctctcatctttttgaattttttcgatacgacttctgatatatctaaatttcttttttatatcgataacgataaccgttgttggttttccgttgcgaatcgcttcaacccttggtttcaaatcgggagaagtgaaaataatcatctcattttcaagtgcggccagacgctcaaagtaactaaaataaacatcaacactacgagctagtttttcacggaaccctttattagcagtccaatcccctctaccaatgtcaaaatatgcagtgataattgtggtggaacttttcattactaataagaccattaatataaaaaaagaattatatcataaatattaatagaatgtatactgtatattatccattcaaatgcttccgttatttatcatacatcggaatattgatactaaagcactattcacatgcaaaaccaacatccgccatgaaggactagctaaaacccaaactagtttgttgcaattagcatccttgcacctctatgtaaagggctgaagggattcggatgtgatggtatgattacagacattcgtgtctgagattgtctctgactccataattcgaaggttacagttatgatcatcgttaccggcggcgcgggctttatcggcagcaacatcgttaaagccctgaatgataaaggcatcaccgatattctggtggtggacaacctgaaagacggcaccaagtttgtgaacctggtggatctgaatatcgcagactatatggataaggaagacttcctgatccagattatggctggcgaagagttcggcgatgtcgaagcgattttccacgaaggcgcgtgctcttccaccaccgagtgggacggcaagtatatgatggataacaactatcaatactccaaggagctgctgcactactgcctggagcgtgaaatcccgttcctgtacgcttcttccgcagccacctacggcggacgcacctccgactttattgaatcccgcgagtacgaaaaaccgttgaacgtctacggttacagtaaattcctgtttgatgaatatgttcgtcaaatcctgcctgaagcgaacagccagattgttggcttccgttatttcaacgtttatggaccgcgtgaaggccataaaggcagcatggcgagcgtcgctttccatctcaacacccagcttaacaacggtgaaagtccgaagctgtttgaaggtagcgagaacttcaaacgcgacttcgtctatgtgggcgacgtggctgatgtgaatctgtggttcctggaaaatggcgtttccggcatcttcaatctcggtactggtcgtgcggaatccttccaggcggtagctgatgctacgctggcttatcacaagaaaggccagatcgaatacattccgttcccggataaactgaaaggccgctatcaggcgttcactcaggcagatctgacaaatctgcgcgcggcgggttacgacaaaccgttcaaaaccgttgctgaaggtgtaacggaatacatggcctggctgaatcgcgacgcataagagctctgcatgaaaatactggtgatcggcccgtcttgggttggcgacatgatgatgagccaaagtctctatcgcacgctccaggcgcgctatccccaggcgataatcgatgtgatggcaccggcatggtgccgtccattattaagccggatgccggaagttaacgaagctattcctatgcctctcggtcacggagcgctggaaatcggcgaacgccgcaaactgggtcatagcctgcgtgaaaagcgctacgaccgcgcctacgtcttacccaactccttcaaatctgcattagtgcctttcttcgcgggtattcctcatcgcaccggctggcgcggcgagatgcgctacggtttactcaacgatgtacgcgtgctcgataaagaagcctggccgctaatggtggaacgctatatagcgctggcctatgacaaaggcattatgcgcacagcacaagatctgccgcagccattgttatggccgcagttgcaggtgagcgaaggtgaaaaaagttatacctgtaatcaatttagccttagtagtgaacgtccgatgattggtttttgcccgggtgcggagtttggtccggcaaaacgctggccacactaccactatgcggagctggcaaagcagctgattgatgaaggttatcaggtggttctgtttggcagcgcgaaagatcatgaagcgggcaatgagattcttgccgctttgaataccgagcagcaggcatggtgtcggaacctggcgggggaaacacagcttgatcaagcggttatcctgattgcagcctgtaaagccattgtcactaacgattctggcctgatgcatgttgcggcggcgctcaatcgtccgctggttgccctgtatggtccgagtagcccggacttcacaccgccgctatcccataaagcgcgcgtgatccgtttgattaccggctatcacaaagtgcgtaaaggtgacgctgcggagggttatcaccagagcttaatcgacattactccccagcgcgtactggaagaactcaacgcgctattgttacaagaggaagcctgacggatgcgggttttgatcgttaaaacaagcagcatgggcgatgttctccatacgttgcccgcactcactgatgcccagcaggcaatcccagggattaagtttgactgggtggtggaagaagggttcgcacagattccttcctggcacgctgccgttgagcgagttattcctgtggcaatacgtcgctggcgtaaagcctggttcagcgcccccataaaagcggaacgcaaagcgtttcgtgaagcgctacaagcagagaactatgacgcagttatcgacgctcaggggctggtaaaaagcgcggcgctggtgacgcgtctggcgcatggcgtaaagcatggcatggactggcaaaccgctcgcgaacctttagccagcctgttttacaatcgtaagcatcatattgcaaaacagcagcacgccgtagaacgcacccgcgaactgtttgccaaaagtttgggctatagcaaaccgcaaacccagggcgattatgctatcgcacagcattttctgacgaacctgcctacagatgctggcgaatatgccgtatttcttcatgcgacgacccgtgatgataaacactggccggaagaacactggcgagaattgattggtttactggctgatagtggaatacggattaaacttccgtggggcgcgccgcatgaggaagaacgggcgaaacgactggcggaaggatttgcttatgttgaagtattgccgaagatgagtctggaaggcgttgcccgcgtgctggccggggctaaatttgtagtgagcgtggatacggggttaagccatttaacggcggcactggatagacccaatatcacggtttatggaccaaccgatccgggattaattggtgggtatgggaagaatcagatggtatgtagggctccaagagaaaatttaattaacctcaacagtcaagcagttttggaaaagttaagtagtttataaaggtaaaacatgctaacatcctttaaacttcatagtttgaaaccttacactctgaaaagtagtatgattttagagataataacttatatattatgtttttttagtatgataattgcattcgtcgataatactttcagcataaaaatatataatatcactgctatagtttgcttattgagtctaattttacgtggcagacaagaaaattataatataaaaaaccttattcttcccctttctatatttttaataggcttgcttgatttaatttggtattctgcgtttaaagtagataatagcccatttcgtgctacttaccatagttatttaaatactgccaaaatatttatatttggttcttttattgttttcttgacactaactagccagctaaaaagtaaaaaagagagtgtattatacactttgtattctctgagttttctaattgctggatatgcaatgtatattaatagcattcatgaaaatgaccgcatttcttttggtgtaggaacggcaacaggagcagcatatagtacaatgctaatagggatagttagtggcgttgcgattctttatactaagaaaaatcatccttttttatttttattaaatagttgcgcggtactttatgttctggcgctaacacaaaccagagcaaccctactcctgttccctataatttgtgttgctgcattaatagcttattataataaaagtcccaagaaattcacttcctctattgttctactaattgctatattagctagcattgttattatatttaataaaccaatacagaatcgctataatgaagcattaaatgacttaaacagttataccaatgctaatagtgttacttccctaggtgcaagactggcaatgtacgaaattggtttaaatatattcataaagagtccttttagttttagaagtgcagagagtcgcgctgaaagtatgaatttgttagttgcagaacacaataggctaagaggggcattggagttttctaacgtacatctacataatgagataattgaagcagggagtctgaaaggtctgatgggaattttttccacacttttcctctattttagtctattttatatagcatataaaaaacgagctttgggtttgttgatattaacgcttggcattgtggggattggactcagtgatgtgatcatatgggcacgcagcattccaattatcattatatccgctatagtcctcttactcgtcattaataatcgtaacaatacaattaattaagaataaacaagtttaagaagtgagttaaaactcacttcttatctatacaacttaatctctttacactattagttaaagtttcagtatcgatatcttttaccgtatatgttggggatactatttgtatagatttatgatgattcggggaccaaattaaatggctgggatattccggagtacgactattagggtaaaatgcaagcgttggtttatgataagccgcagcgatatgaacaagagctgtatcaacagaaatgacaaaatcactatacttggtcaacgcaacggtataaataaactcatcaaatggtagtgtttcgatttcaagtattggtattgtcaataaatcttgcggtaacccggtaaatataatccgataattttcaaagtgtgttttcacttcttgatatataacttttatttgctcaaacgtaagacggcatattttttttgcacctaatggattaataatgactattcttgtatctccaataaattcttttattttatcttcaacatctactggtaaatgcaagtcgtagttggtggaaaatttaccctcaccataaatatgcttcagtatttctattgctcgtgtactcatatgttcttttaaacattcatcgtggggatggtaaaaactatagtaacgcttataccaatgatcaaaacccagaatgtaagaatcttttaaactacttaatattaagctatgcttaaaactgggcatagtttcaaaggggtctaatacaatatcgaactgtaaatcccgcagatgcttacatagagtaagcatttcaagaaaaccggtactttctttaatacagaactcaaatatatttttattattagagagaaattccccaccctttctatttgtgagaagagttattttaacccctttactataaagttcacgataaatgctacttaatacaattagatcaccaagtttattattatcatgaataataaggcaacttttaacttgtgctggatctgtaatttgattatttattttattacgaaataaaaaagaaaggaaattaatcttgattttgtttatataaaatcttttctttttgtgaaaagttcctaagcgcatttttataccatattattttagtttcaggatgattaattagcataagaatcggtactagttctatattgcattttttttcttgtcatatctttactttcttctgcactgatgtcttgaagtttaataaatggaattacatcgtaagaaatagctgtatcatcacttaaattataaatattaatatcttttacattatcatgcataaaacgaaaaaatggcaatattttgaataaatccctacttaattcgctgggcatgggatttttattctcatcatagaaacgagaacagctacccgttaaatcaagaccagaacaaataatccgcgcatacttaagactatatgcgatttgaattgcagcaaaggcaatagtatggcaactgcaataaccaagactaatgtccttgcaaaatccaaccagacgaccttttttagacaacggtacagagatcagcagttctttgtgaatctgtctcaaaatattaaatttaatcttctttataaaaccacctttttcccgacggtaaaaggaccgtaatacgaggcagttctggaggatataaagtttatcttctttggaagcgtgttcataaacgtcaacgtttactatggtataacgacttctctggctaaatttataaaaatcatcacgacgctgatgtaaaaatcggacatctgtaagtacatatataaaaggaacgatattattacttaacagatattgcgcagaaccattgacagcaataatatcctttgttcgtaatacactcaaaggtgttttttggcttgtagggccgctaagaaaaataataacatcatcagatattttattttcaatcaggttttcaacatcttttttgtcaatgtatctaatattcttcatgataaacctgtgaaataaataactccgcttaaaactgtcctggtgaagacatgtaattgtgggattttttttagcgcgctggtttccctttcaaacgccgcataaaattgcgcatttttttacgatatactaaaagataatagcctagatctctaatctcatttttaataccgtaatgacgctctaagtcaatacgatctttcgctttacgctgcgcactagcacgctttccggagagatcgataattcgaacctcaccattttttataatgaagttaccacgatgggggtcgccagaaaccatgccatgttgatgtaaggcattaatactttgctgaattttattttttagcgcatcatcaatatcgggcatatcacacaactctatgccatcaatatactcgatgatcatgatataagtatggacaaaacgtaaggttttccgttcagccaataaataaaagtcattgagtgtatttaacccttcatttcgtactttttgggtttgctcaaaaaggcgttcgtaataatcaccttttaacagagacttaaagaaacgttcgttacgcttaactttcggagaaaaaaccttaagaatcaatttaccgtaatcggtatcaataagcataacttttgtatcatcaatagaacgaaaaaccttgatgatatttatattataagacaagaagtcatttaatacattgaggtacttactattgttttcatcggtaaaaacaaccaagtctttgatcttgctcttctgaatcataataaaccagttaaatgttatttacggtaatattttcggcaaagataacagactcctgctataattcctgagatataatgatgttgcactaaaagatgtttatatcttttttaaattcaataattgatttcgcatctcgtggagagtcatctttccagggggaattttctaaagctattttatagtattttaccgatggataaattgcccatttgtgccacggtttagttgcacctgtataatgaataagaagagtactttctgtaatcagctttttatagttttgatgtgttttgtcttttaattcacttttaattgtataaattgtattgtactcacgaggcaaaaataatgtcatccctttcagtaagacattcataacatcctgatcagggtatttataaacattatctttactcataagaatagacaacgctttttctgttagttttgcgtcagcccattttcttaagtctaaataaacgacaccggaattaaagtactgcccaagtaattcaggatcagacaacctggataccgccttttcttgcattggctcaacatctttaacaacagcagcaaccgctccatttaaacccagatgtaatagttggctaatatcgcctttacaaacaacatctgcatcaagataaagcaaacgatcaagcgttaaacccaataattgaaatgcaaataaacggaagtacattgctcttgaccagacctgtgtacaaggcaagcactggagcttatcagtgttaattctatataacgtgattcttaattggttttgctctgcaagctttgcaattttttgaaaaaaaccatcattataaacatcagcaataatataaaaatcaagattaatatgtcgattatttaggacaattgatgtgatggaaacacctacaccatcaagataattagcatcgacaccataggcaacatttaaacattcagaagtatttatattagctagccgaaaatcccaggctttaactttatctatctctatggcaggaaatgagtccacaatgctacccttatatcattactttatagtttcccagttttaatgctttatcttttcaataaaataaaaaagatagttgctaaatccttttagatatctatgctttttaagcatatgttttgcgctatatcttaattgattgctattgttcggtttcagcaacgccgtattcttccatgggctagcattttttgcctccataaaggcttgacttacaggataatcccaggcccaatcatgccagggcttggttggcccgatataatggataaaaatagtatcgttggttactgggtttataaagctttctttgagttgataatttaagctgaactgggtgttatatttaatatcagcgaaaataagtttatccgccagcaacatatttaacacatcctgatcaggatgtgttatttttttgattatttctggctcatttagcattgcaatagctcgtgcagaaacctgctgagccgcccattgggcagtattaatcaataaaaaaccggagttaaagtaacctttagcaattcccgcaacacctaagctatgggcgcgtttttcccaccagtcagcttgcccttctgtaacaaccattgcgactttatcgtcaggaaaactgaaattaattagtggctcaatagtcccctgacaaatgatatctgcatccagataaaggactttaggcgccttattaataaagtaatctgcaataacaaaacgaaaatatattgcatgagtccaattcttagtgctaggcaaactgcgcagtcgatcaccattaatcagatatattttaattctggttttatactgcaacgccagggcatcaaaatacttacgatcatcatcaccaaaataatcagtaaaaatatggaaacacaatcgacttccttcattatattttaatatactagcaatgctaattccgcaaccaaatagaaagtttttgtcagttccataagcgatgtccagacaaagattttctgtttctactttatgatcataatcaataacactattaagaaactcagtttcctggaaaaacacctgctgcattatttcctccgggaaatagcagaaataattaccttatgtaatctatcgtaatacttgctttggtaaaattcatcgatgctcgcaggaattttttcatgttcgatatgaatttcacctgctatatatttatttagaagagttacaaaaccagcaatatctcccggttgatacagatggccattgacatcaggttgaataatgtcagcaggcccggagacacaatcggcactgatacaaggaatcccccagctcaaggcttcaagtagggtcattgggaaaccttcaaaagaactcgtgagcaataacgcactcactttttcaatatcttgctggaccaattcccagggatattgttgccaaccataccagacaattcgatcatcaatatttaattctctaccataagcctggcatttttcgaaatcggagccatcacccaatacatggagtttccagttacctttcgcttgacttaagccatcaagcaggtctttaactcttttctggccttcaaatttcatacgcccaacataaataaacgttgccgtttcaccttcctcgggcgcgggaatgacactgtctttagtttcgacgggattaaaaataacatttatcgtgctttctgctacacctcgattaatcatttgctgtttaatgccagagctgattgctaaatgatagtcggcacaggtgatatattcagcatgttttttgtgatctaaagaaaaatgtggccaactaaatactggcatatcaattccactttttttacgtgcttttgcggcaaacaggcaggagatcacatcaatacaaataacgatatctggttggtactcctgaagccatttacttagagcatgaatatgtttcgcccgacgcaaaaaacctaaacgaatattggaaaaactacaactgtatttaataccttccagccatcccttatccattttgtcattacgacaaaagaaaaacatttcactttggatatgttgttgcctgaaggtagtaataacatcacggatgacagtttccatgccgccaaatccagaaacagcttcgccgataaacgctattttcatagaaactctcattaattgagtaaaactcactgttttaacggttttatttgtctataaaatcagaaacaatcgtactcatcattttatctggactgaatttatataaactatcataatccattggtttaacagaactgttaataaaatactctaacttatcccaatcatcatgacctattataaaaaagcgagattcactatagatttcactaccaaatacatttatattattagtaattaattttttattgaaaaatagtgcctcaagtatacgaagagtccagccagattggttttctttggttatatcaacaattatattagcatttaatgttcttctaatattctcttcataagatatttgtttttcaatcaaatacttactagtcgtagaacttgtcttatctttgacaacattaaaatctagcttacatcctagtgttgttaatctctcggctaactcattaattatttgaagacgccctttatcacgaccaaggaaaaaacatattggctggctgttatttttgtcagataaactataatttctaatttcatccattcctataggaaaaaattgttctattgccttgatcttttcattccctataaatctatgctcaaaatcatatataatatcgaaataattcgcgttatcaagaataaaatcttcgccaacagtatttcttagaagcaaaactttatgacagttaatattttttaatatttgtttattgatacctttattaacaacactgtcattaatgataattatgtcatcttttttaatatcattgaggtaatgcttgatgaataatcgccccagccatgcattatccatccctattttacttatttttttattaatccagttatatttttttggtgttgttatattttttatcttgtacttttttttcaggtactgaatcatttttaattcataatctgcaacccaatttataaaataaatagtcataataaagttagttccagtacatactaataaatatttttataatcctttgcgttgtgttcgctctttaatacgctcggccttaacgcttgccatgttcaataaattctgttcaagagacaatattttgcgtaaaggcatcccaaaataaaccttcataaatcgccagatatctctttgcgtcaggccaatattcatactactgaaatataaaccaatcaggtctttatcgcgccagcggcgcggtacttttgcacgtatctgtgcccgatgcagatcgataacactaatttttaattcatcttcccggccagtaaatggcaaatgaagcaaaaagtggcaaatgtaacagtcgcggtgatttatccctgcagtatgcattttacgcaccatagttgctacacgtgcgatcagcatacgcttaacacgtatatcaggcgggttgactgcccaatcggcacaataatcttcaaggctaattgtgggagtgagatcttcggtaataataaaacttgcgcgagttaatggatttaaccctttttcgccaaacccaatgcccttcattgtatcaacgccaacatcactcaggcgatgaatagcgtgccactctctgtctgcgcccaaaacgggcatccgcaaactgagtagattttttataatctcttttaatgtcgtccccttgtgccatttaagaaaatagcttttcccggacagttcaaagcgtaatgtacgacgagtctccagttcacgaaagacctcgccgttcagttttttgacctctgcaaaagcatctttaccacgccaaagtgtggcaagcggctcttttaattcaaccatctaaaccacctgtaatgatatccgcggctttttctggcaagctatacaaatcctgagtatcggcataatggcgagcattctccgcccaggccattcgcaatgggctctgagttaacgctttacgtaaaacttcatttaattgttcctgagagaaaggttcagcgatgaccgttccacaattggcatccgcaatataatgcgcgtacccacataccgctgttgttaaaacaggtaacccagcagtgatcgcttctagaagaacgatacccgcggcttcctgataagcgggatgcagtaataaatcagcggctgccattaattcactcacatcattgcgaccgaagaagaaatgcacattgctccgcacgccgagtttttctgccagcgcttcaaattttcgcggcttatcctgaccaacaacaaataaaagcgtattgtgacgtaaactttccggtaagcttgccaaagcttcaatactgcgatctacacctttacggccaaaatcacttccaacctgcagtaataagttttgttgctcttttatgccatttttctggcgataaatttcacggctgtttgggatttgctcactgtattttctgtccggataaataccgggaggaagaatttgaaaacgttcaggttcagtttgataatgcttctggaaatcggcgatttgcttatcggtcagcatcataagtttcgtgcttttaccctgctcgaaagtcgctcgctcaaatgcggcataatggcgatatcgacttgttaaacgatataaaaaacctttttcttgcgcaactttctcggcgtaacaaacatcagcggcaaaataaacatccaggccaggcatcttattaaacccaacaacgcgatctgcgggatgctctttgagatgattttgtacccaggcataatattctgcattgcgtccatggttggtatgggacttaactggcacctgaataagctcaaatgctttcgggcaatcgccttcccagctctgtgtatatacccgaacatggtggccccgtgcggcaactgtacttgcaatgcgcataaagtcacgttgaagcccaccaaatggaaaatatttatataaacaaaacgccacgatcataattgtgcattcctgtcagcactaggggcatcttctggcaacagcttttccgtagcggcgatcacatcctccgctgggataacagaaagatattttttgttgcggtcaagttcatgccgggtcggcattttctgataattccccgcccagaattgaataatattctcggtccagggacgccagaatacgtgatccgttgcaccaaatagactaatgactggcgttttcactgccgctgcaatatgtcccggcgcagaatccacaccaataaaaagcactgcatgatcaattaatgcacccagttcaggaaaacgtgttttacctgcaaggccagtaatgggttttgtttcgcaacctcgtgcaatctcatctacacaagcgagatcatctgcgctgggcccacaggttagcacaacctgatagcctcgctgttgcagcgcatcgataaccttagaaaatttatcgttatcccaacacttaaatatctgacgcgctgtcggttggatgacaacataatgatcttttacgcccagggcatctaattcccggcgcatcttcttccagcaatcttcggcgtaactcattgttgtgtcggtgtagaaatcggtaatacctaatggctcaaggacgcttaaattacgctcaacaatatgtgtaccgtgtattggcgctaagtgtgtgaagctttttttccaaataccatgctgccgatgaccataaagttggcttattttcatccgtgcaggtaaacaacgtaccagcagcgccaccatccactgatccgtaagattaatgaccaggtcataattattcgcacgcagagtttttatcaagctaagcacatttttaattttatcgaaagttcccgcacctttattgcttatcccatagagcgcattaatttccgggttttcagacaaaatagggatggtgtcctgataaagcagcatatcgatttttgcatcaggataattctgcttgagcgtactgatgacaggagtagttaataacatatccccatgatatcgcatctttatgaccaggatttttcgaaatggcttttccactagcgactcttttgtgtgattgtctggttaagttaagcagaaaaaagcacgctaccgccccaggctcaacagctacctgaatactgataacgcacttactttgacgtgctagtgtatcatttctttcgcagcaatccgacccgaatgatttttatacacaaaatatactttaatcataaaaatcaaatagataaaaaatagcatttcgataatgtcagtacggcctatgtagatttgaaaatggggccgagtttcaatgaatcgcataaaaatacaaaaaaaatgaagatgtagcggcagatcagaccaaactgaagctatttaagtcaaaaacgggaaaagtaatggtaaagccacagctaaatacatagaatccccagcacatccataagtcagctatttactatgctcgaattgctttacaccgcccttctctaccttattcagccgctgatctggatacggctctgggtgcgcggacgtaaggctccggcctatcgaaaacgctggggtgaacgttacggtttttaccgccatccgctaaaaccaggcggcattatgctgcactccgtctccgtcggtgaaactctggcggcaatcccgttggtgcgcgcgctgcgtcatcgttatcctgatttaccgattaccgtaacaaccatgacgccaaccggtagcgagcgcgtacaaagcgctttcgggaaggatgttcagcacgtttatctgccgtatgatctgcccgatgcactcaaccgtttcctgaataaagtcgaccctaaactggtgttgattatggaaaccgaactatggcctaacctgattgcggcgctacataaacgtaaaattccgctggtgatcgctaacgcgcgactctctgcccgcagcgccgcaggttatgccaaactgggtaaattcgtccgtcgcttgctgcgtcgtattacgctgattgctgcgcaaaatgaagaagatggtgcacgttttgtggcgctgggcgcaaaaaataatcaggtgaccgttaccggtagcctgaaattcgatatttctgtaacgccgcagttggctgctaaagccgtgacgctgcgccgccagtgggcaccacaccgcccggtatggattgccaccagcactcacgaaggcgaagagagtgtggtgatcgccgcacatcaggcattgttacagcaattcccgaatttattgctcatcctggtaccccgtcatccggaacgcttcccggatgcgattaaccttgtccgccaggctggactaagctatatcacacgctctagtggggaagtcccctccaccagcacgcaggttgtggttggcgatacgatgggcgagttgatgttactgtatggcattgccgatctcgcctttgttggcggtagtctggttgaacgtggtgggcataatccgctggaagctgccgcacacgctattccggtattgatggggccgcatacttttaactttaaagacatttgcgcgcggctggagcaggcaagcgggctgattaccgttaccgatgccactacgcttgcaaaagaggtttcctctttactcaccgacgccgattaccgtagtttctatggccgtcatgccgttgaagtactgtatcaaaaccagggcgcgctacagcgtctgcttcaactgctggaaccttacctgccaccgaaaacgcattgaggttgttatgcaaaaacgggcgatttatccgggtactttcgatcccattaccaatggtcatatcgatatcgtgacgcgcgccacgcagatgttcgatcacgttattctggcgattgccgccagccccagtaaaaaaccgatgtttaccctggaagagcgtgtggcactggcacagcaggcaaccgcgcatctggggaacgtggaagtggtcgggtttagtgatttaatggcgaacttcgcccgtaatcaacacgctacggtgctgattcgtggcctgcgtgcggtggcagattttgaatatgaaatgcagctggcgcatatgaatcgccacttaatgccggaactggaaagtgtgtttctgatgccgagcaaagagtggagctttatctctagtagcttggtgaaagaggtggcgcgccatcagggcgatgtcacccatttcctgccggagaatgtccatcaggcgctgatggcgaagttagcgtaacgtttatgccggatggtatgccatccggcgcgcatgaattacttctggcactgccgacaataaaacgttgcccgctgcgcatgtttagtcgccacaatcggcgtaccgcacacccgacacggctcaccttttcgcccgtaaacctgcaattcctgagcgaaatagcccggtttaccatcactttgcagaaaatctttcagcgttgtaccaccctgctcaatgctacgcagcaacaccgctttaatcacccgagctaacaattcacactctgccaggctcagactactcgccagccgatccggatggatccccgccgcaaacagactttcgctggcatagatattccctacccctaccaccagcttgttatccatcagccacggtttaatcgccgtttttttcttcgcgcacttctgatgcagatactcaccattgaaatcgtcgctaagcggctccggtccaagatgggtcagcacattatgcccttccagctctttggtccacagccaggcaccaaagcggcgcggatcggtgtagcgcagcactttgccgttgctcatcaccaaatccacatggtcatgcttttcagggggaagttcttctggaaggatgcgcaggctgccagacatccctaaatgaatgataatccagccctcaggcagctccagcagcagatatttagcccgccgctgcacgctaagcactggttggtcgcttaaacggtagatctcttcactaaccggccagcgcaagcgtccgttgcgcaccactgcatgaagaatggttgcaccaacgagatgcggttctatgccgcggcggctggtttcaacttcgggtaattcaggcatagcatctccaggaatgaacagatgcagtcaatatgggggcaagcagataacaaaaaaccccgccggagcgaggttttttgttacatcaaagcgagaattatttgattttcgcttctttgtagatcacgtgctggcgaacaactggatcgaattttttcagttccagtttttccggcttagtacgtttgttcttcgtagtggtatagaagtgaccagtaccagcagaagaaaccagcttgattttctcacgaatacctttagccatgatttatttcctctaagtacttagtacttttcgccacgggcacgcagttcagccagaactgtatcgatgccttttttatcgattacacgcatacctttagcagatacgcgcagggtgacaaaacgcttctcgctctcaacccagaaacggtgagagtgcaggttcggcaggaaacggcgtttagtcgcgttcagtgcgtgggaacggttgttaccggtcaccggacgcttgccagtaacttggcagactcgggacatgtctattctccaaaaatcaaattagctcgagcttcgtatggggtattggcgcctcgtcaggctttacagcccggtcatcgcagttctatgtgaactctcgattgccaggcccaaatgccaaacccgagattctcaaaggtggcgtagtatacgctgactcagcgatgtgctcaagtcccgaacagacaaagatcccgaaggatcgcgcatagcgggttaaatccagccgcgttcggcaaaagaaacatactctccacgcccaatcacgatatggtcgagcacgcgtaaatccatgaactgacaactctttattatccgttcagtaatgagtttatccgctttactgggttcagcacaaccgctagggtgattatgtgcaaggatcagcgcgctggcgtttatttttatcgcttcgcggataatttcccgaggatggacttcaacatggtttagcgtgccggaaaaaagacgcctatgcgttataacccggtgttgggagtcgagaaagatcaccataaagatctcccgctcctcacccgtgagctggctttgtaaaaattccctcgtcatctccgggctgagtaaagggctttcttcacgcatccgcacgttgtagtaacgccgcgccagttcagcaatcccctttaactgggcaaatttcgccacgccaattccatgaacgccactaaattgttcatattcagaggttaacaagccataaagagagccgaaattctccagcatctcttttgccagggttaatacatctttaccgcgcgttccggtacgcagaaatagcgccagcagctcgacatccgttaaggcgctaataccaaacttcagcattttttcgcgcggcatcaacagctgactattgtttttcaccttcacctcctttgtggtgctcgcatcctgtcatagccgtttcgttaaatcgacggccagttttcaatcctggaaagcgcctcgcaaagtgaatctcaggtgaaggcacgacaacaaaagtattgtgataaaatcgccaacttctggtgtcaccctacaggaaaaatcatcatgagcctggccggtaaaaaaatcgttctcggcgttagcggcggtattgctgcctataaaacccctgaactggtgcgtcgtttgcgcgatcgcggggccgacgtccgcgtagccatgaccgaagcggcaaaagcctttatcaccccacttagcttgcaggcggtttctggttatcccgtttccgacagtctgctggacccggcagccgaagccgctatgggccatattgagctgggtaaatgggctgatttagtgattctcgcccctgccacggcagatttgattgcccgtgttgctgccggaatggcgaatgacctggtaagcacgatttgtctggctacacctgcgcctgtagccgtgctccccgccatgaaccagcagatgtaccgtgccgctgccacgcagcataatttagaggtgcttgcttcccgtggtttgctcatctgggggccagacagtggcagtcaggcttgtggtgatatcggtcctgggcgaatgctcgatccgttaaccattgtggatatggcggtagcgcattttagccccgtcaacgacctgaaacatctgaacattatgattaccgccggcccgacgcgtgaaccgctcgatccggtgcgttatatctctaatcacagctccggcaagatgggttttgctatcgccgccgccgctgcccgtcgtggcgcgaacgtcacgctggtaagtggtccggttagtctaccgacgccaccgtttgttaaacgtgttgatgtgatgaccgcgctggaaatggaagccgccgtgaatgcttctgtacagcagcaaaatatttttatcggctgcgccgccgtggcggattatcgcgcagctaccgtggccccagagaaaatcaaaaagcaggccacgcagggtgatgaattaacaataaaaatggttaaaaaccccgatatcgtcgcaggcgttgccgcactaaaagaccatcgaccctacgtcgttggatttgccgccgaaacaaataatgtggaagaatacgcccggcaaaaacgtatccgtaaaaaccttgatctgatctgcgcgaacgatgtttcccagccaactcaaggatttaacagcgacaacaacgcattacaccttttctggcaggacggagataaagtcttaccgcttgagcgcaaagagctccttggccaattattactcgacgagatcgtgacccgttatgatgaaaaaaatcgacgttaagattctggacccgcgcgttgggaaggaatttccgctcccgacttatgccacctctggctctgccggacttgacctgcgtgcctgtctcaacgacgccgtagaactggctccgggtgacactacgctggttccgaccgggctggcgattcatattgccgatcctagtctggcggcaatgatgctgccgcgctccggattgggacataagcacggtatcgtgcttggtaacctggtaggattgatcgattctgactatcagggccagttgatgatttccgtgtggaaccgtggtcaggacagcttcaccattcaacctggcgaacgcatcgcccagatgatttttgttccggtagtacaggctgaatttaatctggtggaagatttcgacgccaccgaccgcggtgaaggcggctttggtcactctggtcgtcagtaacacatacgcatccgaataacgtcataacatagccgcaaacatttcgtttgcggtcatagcgtgggtgccgcctggcaagtgcttattttcaggggtattttgtaacatggcagaaaaacaaactgcgaaaaggaaccgtcgcgaggaaatacttcagtctctggcgctgatgctggaatccagcgatggaagccaacgtatcacgacggcaaaactggccgcctctgtcggcgtttccgaagcggcactgtatcgccacttccccagtaagacccgcatgttcgatagcctgattgagtttatcgaagatagcctgattactcgcatcaacctgattctgaaagatgagaaagacaccacagcgcgcctgcgtctgattgtgttgctgcttctcggttttggtgagcgtaatcctggcctgacccgcatcctcactggtcatgcgctaatgtttgaacaggatcgcctgcaagggcgcatcaaccagctgttcgagcgtattgaagcgcagctgcgccaggtattgcgtgaaaagagaatgcgtgagggtgaaggttacaccaccgatgaaaccctgctggcaagccagatcctggccttctgtgaaggtatgctgagtcgttttgtccgcagcgaatttaaataccgcccgacggatgattttgacgcccgctggccgctaattgcggcacagttgcagtaatatgacgccggatgacttttcatccggcgagtttctttaaacgccaaactcttcgcgataggccttaaccgccgccagatgttccgccatttccggcttctcttccaggtaagcaatcaggtctttcagggtgatgatagagatcactttgcagttgtaatcacgctcaacttcctgaatcgcgctaatctcgccgcgcccgcgttcctgacgatcgaggctaatcaacacgccagcaagcgtcgcgccattggcctgaataatctccatgctctcgcgaatcgccgttccggcggtgatcacatcatctaccagcattacgcgtccttgtaacgcgctaccaaccagattgccgccttcaccgtggtcttttgcttctttgcggttaaagcagtacggcaggtccaggtcgtgatgctccgccagtgccacagcggttgtggtggcaatcgggatccctttgtaagcagggccaaacagcagatcgaactcaatgccggaatccaccaacgcttcagcgtaaaaacggcctaacagtgccagatcgcgcccggtattaaacagcccggcgttgaagaaataggggcttttgcgcccggatttcagcgtaaactcgccaaactttaacacctgcttgctaagcgcaaattcaataaactggcgctgatatggtttcatgccttcgctcctcatcttacttttctacagacaaaaaaaaggcgactcatcagtcgccttaaaaatcagtttgccagcgccgccttctgcgtcgttacaatggattgctttcccctcgggccagagccaacaagatgagtagctcttcatgggtgaacggctcgccttctgccgtcccctgcacttcaatgatgcgcccgtcttcggtcatcactacgttcatgtcggtctctgcggcagagtcttcaacgtattccagatcgcaaaccgcttcgccgttcacaattccgacagaaactgcggctaccatccctttcatcggattggttttcagcttgccgttttccaccagcttctgtagcgcatctaccagcgccacgcaggcacccgtaatgctcgcggtacgcgtgccaccatcagcctgaagcacgtcgcagtccagcgtaatggtgaactcacccagcgctttcaaatctactgccgcgcgaagagcacgggcgatcagacgctggatttccattgtgcgtccaccctgcttacctttcgccgcttcacgagcgttacgggtgtgggtagaacgtggcagcatgccgtactctgcggtgatccagccctggccctgacctttcaggaagcgcggcacgccttcttcaatagaggcggtacacaacactttggtatcgccaaattcgaccagcacgctgccttctgcatgttttgtatagttacgagtcagggtaacgggacgcacctgattattgctacggcctgctggacgcatattgaaatctccggcttgaaacaaatgtggctgcgcattatacggacttccggcggttattcctatcctgacaaggcatcgatggctataatccttccacctctccttttataaacaggaacgtctatgatccgcagtatgaccgcctacgcccggcgtgaaatcaagggtgaatgggggagcgcaacctgggaaatgcgcagcgtaaaccagcgttatctggaaacttactttcgtctgccggagcagttccgtagccttgaacctgtcgttcgcgagcgtattcgttctcgcctgacgcgcggtaaagtggaatgtaccctgcgctatgagccagatgttagcgcgcaaggtgagctgatcctcaacgaaaaactggctaaacagctggtaactgccgcgaactgggtaaaaatgcagagtgacgaaggggaaatcaacccggttgatattctacgctggccgggcgtgatggcagcccaggagcaggatcttgacgccattgccgctgaaattctcgcggcgctggatggtacgctggacgactttattgtcgcgcgcgaaaccgaaggtcaggcactgaaagcattgatcgagcagcgtctggaaggcgtcaccgccgaagtggtcaaagtccgctcccatatgccggaaatcctgcaatggcagcgtgagcgtctggtcgcgaagctggaagatgctcaggtgcaactggaaaacaaccgtctggagcaggaactggttctgctggcacaacgaattgacgttgccgaagaactggatcgcctcgaagcgcatgtcaaagagacctacaacattctgaagaaaaaagaagcggttggtcgtcgtctggattttatgatgcaggagttcaaccgcgagagcaacactcttgcgagcaagtctatcaatgccgaagtgacaaactccgccatcgagctgaaagtgttgattgagcagatgcgcgagcagattcagaacatcgaataactcgtaacgccaattcttacttttccgccttcacaaatgccgccactcaaacagagcggcatttttcttccccgcaacattcaattctgttttgcgtgcctgctccagattttgcgatgtttttttgcccagcacactgagaacgcgagatactcacaactgtatataaatacagttacagatttactttctttgcaattgatatcacatggagtgggcaatgaacgaacatcatcaaccttttgaagagataaaactgattaatgcaaacggagcagaacaatggagtgcaagacaacttgggaaactactgggttatagtgagtatcgtcactttatacctgtattaacgcgcgccaaagaagcctgtgagaacagtggtcacacaattgatgaccatttcgaggagatcctcgatatggtcaaaattggcagtaatgccaaaagagcattaaaagacatcgtactctcccgctatgcctgttacctggtagtacaaaacggcgaccctgcgaaaccggtcattgcggcagggcagacttattttgctatccagacccgacggcaggagcttgctgacgatgaagcatttaagcaacttcgtgaagacgaaaagcgtctgtttctgagaaatgagttgaaagaacataacaaacaattggttgaggcagcacagcaagctggggtagcgacagctactgatttcgccatatttcagaatcatggttaccaggggctgtatggtggattagatcagaaagctattcatcagcggaaggggctgaaaaagaatcagaagatcctggatcatatgggtagtacagaactggcggctaatctctttcgagctacccaaacagaagaaaaactcaagcgggatggcgtgaatagtaaacagcaagcaaacaccacacactttgacgtgggtcgcaaggtgaggcaaaccattcaggaacttggcggaaccatgcctgaggagttgccgaccccgcaggtcagcatcaagcagttggaaaacagtgtaaaaattacagagaagaaataacagaaactaaaaactctttttgttgattgagacacccgatgcgtaagccaaggtccaggtgcagtgaacacaatggctaaatattgcacctttcttttccccctcagttttaacctattttttcttatgcattttctcagacaagaagtcagaagaatgcatctctgctacagaaaatagcgatttcacataactacaagttatcaatttcccctccccttaaaaaatctcaatcgtgacaatgcgcacaaatcgctaccctgccagacagatttttagggagagaaccatgctgttatacattttgtatttggttggcattactgccgaagccatgacgggggcgctggcggccggacgacggcgcatggatacatttggcgtaattattattgcgaccgccaccgcaattggcggagggagtgtgcgcgatattctgctgggccactatccgctcggctgggtcaaacacccggaatatgtgattatcgtcgctaccgccgcagtactcaccactatcgttgctcctgtaatgccttacctgcgcaaagtgtttctggtgctcgatgcgctcggactggtggtcttttctatcatcggggcacaggttgcactggatatggggcacggcccaattattgccgttgtcgcggcggtaaccaccggcgtgtttggcggcgttttgcgcgatatgttctgtaaacgtatcccactggtattccagaaagagttgtatgccggtgtcagttttgcctccgccgtgctgtacatcgcgctgcaacactatgtttctaaccatgatgtggtaattatctccaccctggtattcggcttttttgcccgcttactggcgctacgccttaagctgggattaccggtcttttactacagccacgaaggacattaaggttcaaaacctgtgatctgctgggcagccagccaactgcccagcttcttgatttgcgcattttccttccattcaataacctgtctggcgcgtccgcttccagtccccggcagctgctgccagaactgctccgtgctaaataaaagttggctccaggaccgttcatcactggcattaagcgccgcccgggttagcggtattcccattgccatcacccagcgagtaaaaggctgcttacgagccagattaaactgatgccatagctgcgcacttttacttttcgcgatccccggcgtgttctgtaattgctctggcgttaataaaagccaggaaaagatatgttcaaagcgatgagtctgatgcagcgcgcgccaaccggcctcaccaatgccatccagcccaagaacctgttttgcccccagccagactaagcgactaatgaactgttcctgacaaacatcagaagcaaagtagcaggtcaagctgttaaagcggttttctggcggtgtcggttttgtacgttctgcaccgcgccacaccacatcatcaatgcgaggaataccctgaccggcaaggctgacgagaatctgatcaccaggcgcaatatcccactcctgccagcgcctgacggaaccaatattcacccgctggacttttttatcatccagcatgacaggtgcgagactcgcaaccacgcttattttaccgctcttacccaccgcaaactgaattgccttcacttcggcaacctgagctacaggttgatatttccaggccaccagccactctgcctggcccggtagccaatggcgggattctggctctttcgccgctcgtacaactacgccatcggtgacgaagggtaattccgctttccaccactcattgcgtacgcgcgcaacttcatcagcatttttcaccgcacgggtatacgtctgcgttagagtaaaacctgcggtagccagctcttttaaacgatcagacattaactgcggtccatccggccatgcccagacaaaaacgcccagagaattcagcgtgtcgctatcgtcctggcgcatcatcaagccagcaacttttgcgcgggcatttattccccccatttgttgttggatatgcccctcgcgctggagaaatatttccccctgaagcgtactgttggctaaaggcccgctaacggtttgcggcacagcggaaattaagctaactttctgcgtccagtcctcgcctttcaggccattaccgcgactgattgctttgttcagtttcccgtcccgataaaccagggttaccgcaacgccatcaacttttggctgcacccaaagatcgctacgttctcgcatccacagacttaatgcgtttttatccaccattttgcgtacacccgtatgggcaaccggatgcataaccgcaccatttaaaggcggcatcatcacgtcgcggggctcgctcccaaagcagcgttgccactgcgtaagacgggcgcttaactgatcgtaaacaccgtcttccacctcactttttccttccttccagtagtcatcgtcccactgttttatttgctgttgcaggcgggaaatttcttcctgtgctctggctgggctccaggccggacagaccgcccacacagaactttgccagcacaagatacctattaatatcgccatccatactttcatcatcacctccgctgtagatagtcaggcagatatacaacgtgatgaaagcaaagccgagtggcaaaaacggagtctgcgaggacgcttcctgaaaatcgtctttattgcagtgaatgacaggcaaatgcggaagcagctacgcaaaacgcaacaactttgcgcaaaaagtgtgagcaagggctacgtcacatggccgcgccgtgtataataagctcgtatgtaggctttatttcgctaatcacatacgaaagatactcatggctcaaggcacgctttatattgtttccgcccccagtggcgcgggtaaatccagcctgattcaggctttattaaaaacccaaccgttgtgtgacacccaggtttctgttagtcacaccacacgccaaccgcgtcctggtgaagtccacggtgaacattatttctttgttaatcatgatgaatttaaagaaatgattagcagagatgcgttcctcgaacacgcagaagtttttggtaattactatggcactagccgtgaggccattgagcaagtactggcgaccggtgtcgatgtttttctcgatatcgactggcagggcgcgcagcaaattcgccagaagatgccgcacgcgcggagtatctttattttaccgccgtccaaaattgaactggaccgccgtctacgcggtcgcggtcaggacagcgaagaggtcattgcaaagcgtatggcgcaagctgttgcagaaatgagccattacgccgaatatgattatctgattgtgaatgatgacttcgataccgcgttgaccgatttgaagaccattattcgcgccgaacgtctgcgcatgagccgccaaaagcagcgtcatgacgctttaatcagcaaattgttggcagactgaacctgatttcagtatcatgcccagtcatttcttcacctgtggagctttttaagtatggcacgcgtaactgttcaggacgctgtagagaaaattggtaaccgttttgacctggtactggtcgccgcgcgtcgcgctcgtcagatgcaggtaggcggaaaggatccgctggtaccggaagaaaacgataaaaccactgtaatcgcgctgcgcgaaatcgaagaaggtctgatcaacaaccagatcctcgacgttcgcgaacgccaggaacagcaagagcaggaagccgctgaattacaagccgttaccgctattgctgaaggtcgtcgttaatcacaaagcgggtcgcccttgtatctgtttgaaagcctgaatcaactgattcaaacctacctgccggaagaccaaatcaagcgtctgcggcaggcgtatctcgttgcacgtgatgctcacgaggggcaaacacgtagtagcggtgaaccctatatcacgcacccggtagcggttgcctgcattctggccgagatgaaactcgactatgaaacgctgatggcggcgctgctgcatgacgtgattgaagatactcccgccacctaccaggatatggaacagctttttggtaaaagcgtcgccgagctggtagagggggtgagcaaacttgataaactcaagttccgcgataagaaagaggcgcaggccgaaaactttcgcaagatgattatggcgatggtgcaggatatccgcgtcatcctcatcaaacttgccgaccgtacccacaacatgcgcacgctgggcagtcttcgcccggacaaacgtcgccgcatcgcccgtgaaactctcgaaatttatagcccgctggcgcaccgtttaggtatccaccacattaaaaccgaactcgaagagctgggttttgaggcgctgtatcccaaccgttatcgcgtaatcaaagaagtggtgaaagccgcgcgcggcaaccgtaaagagatgatccagaagattctttctgaaatcgaagggcgtttgcaggaagcgggaataccgtgccgcgtcagtggtcgcgagaagcatctttatagcatttactgcaaaatggtgctcaaagagcagcgttttcacagcatcatggacatctacgctttccgcgtgatcgtcaatgattctgacacctgttatcgcgtgctgggccagatgcacagcctgtacaagccgcgtccgggccgcgtgaaagactatatcgccattccaaaagcgaacggctatcagtctttgcacaccagcatgatcggcccgcacggtgtgccggttgaggtccagatccgtaccgaagatatggaccagatggcggagatgggtgttgccgcgcactgggcttataaagagcacggcgaaaccagtactaccgcacaaatccgcgcccagcgctggatgcaaagcctgctggagctgcaacagagcgccggtagtagctttgaatttatcgagagcgttaaatccgatctcttcccggatgagatttacgttttcacaccggaagggcgcattgtcgagctgcctgccggtgcaacgcccgtcgacttcgcttatgcagtgcataccgatatcggtcatgcctgcgtgggcgcacgcgttgaccgccagccttacccgctgagccagccgcttaccagcggtcaaaccgttgaaatcattaccgctccgggcgctcgcccgaatgccgcttggctgaactttgtcgttagcagcaaagcgcgcgccaaaattcgtcagttgctgaaaaacctcaagcgtgatgattctgtaagcctgggccgtcgtctgctcaaccatgctttgggtggtagccgtaagctgaatgaaatcccgcaggaaaatattcagcgcgagctggatcgcatgaagctggcaacgcttgacgatctgctggcagaaatcggacttggtaacgcaatgagcgtggtggtcgcgaaaaatctgcaacatggggacgcctccattccaccggcaacccaaagccacggacatctgcccattaaaggtgccgatggcgtgctgatcacctttgcgaaatgctgccgccctattcctggcgacccgattatcgcccacgtcagccccggtaaaggtctggtgatccaccatgaatcctgccgtaatatccgtggctaccagaaagagccagagaagtttatggctgtggaatgggataaagagacggcgcaggagttcatcaccgaaatcaaggtggagatgttcaatcatcagggtgcgctggcaaacctgacggcggcaattaacaccacgactagcaatattcaaagtttgaatacggaagagaaagatggtcgcgtctacagcgcctttattcgtctgaccgctcgtgaccgtgtgcatctggcgaatatcatgcgcaaaatccgcgtgatgccagacgtgattaaagtcacccgaaaccgaaattaatgttttatgaacccaacacgttatgcacgcatctgcgaaatgctcgccaggcggcagcctgatctgaccgtctgcatggagcaggtccacaaacctcataacgtttctgcgattattcgtaccgcagatgccgttggcgtacatgaagttcacgccgtctggcctggtagccgcatgcgcaccatggctagcgcagcggcgggtagtaacagctgggtacaggtgaaaacacaccgcaccattggcgatgccgtcgctcatctcaaaggccagggcatgcagattctggcaacccatctttctgataacgctgtcgatttccgcgaaattgattacactcgcccgacctgcattttgatgggacaggagaaaacgggcatcacgcaggaagcattggccctggcggatcaggacatcatcattccgatgatcggcatggtgcagagcctgaatgtttccgttgccagtgccctcattctttacgaagcccagcgtcagcggcaaaatgcaggcatgtacctgcgtgaaaacagcatgttgccggaagcagagcaacaacgcctgttgtttgaaggcggctatccggtgctggcgaaagtcgcaaaacgcaaaggcctgccttatccccacgtcaatcagcaaggcgagatcgaagctgatgccgactggtgggctactatgcaggctgcagggtaagtgccatgaaaggtcgcctgttagatgctgtcccactcagttccctaacgggcgttggcgcagcacttagtaacaaactggcgaaaatcaacctgcataccgtgcaggatctactcttacaccttcccctgcgctacgaagatcgcacccatctctaccccatcggagaactactgccgggcgtttatgccacggtggaaggcgaagtgctgaactgcaatatctccttcggcggtcggcggatgatgacctgccagatcagcgacggttccggcatcctcaccatgcgctttttcaatttcagcgcggcaatgaaaaatagcctggcggcgggccgccgtgtactggcttatggcgaagcaaagcgcggtaaatatggtgcggagatgatccacccggaataccgcgtgcagggcgatctcagcacgccagaattacaggaaacgctcacgccggtttatccaacaacggaaggcgtaaagcaggccacgctgcgtaaattaaccgaccaggcgctggatctgctcgacacctgcgccattgaagaactcctgccgccggaactgagtcaaggaatgatgacgctaccggaagcgttgcgcactttgcaccgcccgccaccgacgctacagcttagcgatctggaaaccgggcagcatccggcgcaacgtcgtctgattctggaagaactgctggcgcacaacctcagcatgttagccttacgtgccggagcacagcgttttcatgcccagccgctgagcgccaatgacacgctgaaaaataaactcctcgccgccttaccgttcaagccaacgggcgcacaggcacgcgtagtggcggagatcgagcgcgatatggcgctggatgtgccgatgatgcgtctggtgcagggcgatgtaggttccggtaaaacgctggtcgccgccctcgccgcgttgcgtgcgattgcccacggcaaacaggtagcattgatggcaccaaccgaattactcgccgagcagcacgccaataacttccgcaactggtttgcaccgctcggtatcgaagtgggctggctcgccggtaagcagaaaggtaaagcacggctggcacagcaggaagccatcgccagcggtcaggtgcagatgattgtcggtacacacgccatcttccaggaacaggtgcagtttaacggcctggcgctggtgattatcgacgaacagcatcgttttggcgtgcatcagcgtctggcattgtgggagaaaggccagcagcagggcttccatccgcatcagttgatcatgaccgccacgccgatcccccgcacgctggcaatgactgcgtatgccgatctcgataccagcgtgatagatgagctgccgccaggccgcacgccagtgactacggtcgctattcctgatacccgccgtaccgacatcattgaccgcgtgcaccacgcctgcataactgaaggtcgtcaggcatactgggtttgtacgttgattgaagagagcgaattgctggaagcgcaggcggcggaagctacctgggaagagttgaaactggcgctaccagagttgaacgttggcctggtacacgggcggatgaaacctgccgagaaacaggcggtgatggcgagctttaaacaaggtgagctacacctgctggttgccacaaccgttattgaagtcggcgttgatgtgcctaacgccagtctgatgattatcgaaaacccggagcgtctgggtctggcgcagttacaccagctgcgcgggcgcgtaggtcgtggcgcggtggcttctcactgcgtgctgctctacaaaacgccgctttctaaaacggcgcaaattcgcctgcaagtgctgcgcgacagtaacgacggttttgtgattgcgcaaaaagatctggagattcgcggccctggcgaattgttaggcacgcgtcagacgggtaatgctgaatttaaagtggcggatttactgcgcgatcaggcgatgatcccggaagttcagcgcctggcacgccatattcacgaacgttacccacaacaggcaaaagccctgatagaacgctggatgccggagacggaacgttacagcaatgcgtaaaaggcggcagtgagaagaccgccatttcaggttaccctaccttcctgccggatgcgattcatcaccctacaaattcaataaattatgaatcaatacgcaggcttgataagcgaagcgtatcaggcatttgtctttgttgcggcggcacttctaccgccgcttcatcggttaaccggcaaaaatcggcaacatcaaatacaacttaattaccagcgcattgacgatatcgataaagaacgcaccgaccatcggcaccaccaaaaacgccatgtggcccgggccaaagcgttcagtgatcgcctgcatgttggcgattgccgttggcgttgcaccgaggccaaaaccacagtgacccgcagccagcactgccgcatcgtagtttttgcccatcatgcgccaggtaacgaagatggcatacaacgccatgaagatggtctgtaccaccagaatcgccagcatcggcagcgccaggctagccagctcccacagtttcagccccatcaacgccatcgccaggaacaagctcaagcttacgttacccagcacggataccgcacgctcaaagacgcggtaaaagcccattatactcagaccgttgctcagaatcacgccaacaaacagtacacagacgaaggtcggcagttcaaaagcagtgccagccaaaagttgcgcaacaattttccccaccgtcaggcagatagcaatcagcgcgatagtttcaatcagcaccaagctggtgatcatgcgtcccacatccggcttttcaaacgccgtcgggacttcctggtcatccggaataccgttcggcgtggtggagtgtttcaccagatagcgcgccaccggaccgccaatcaagccgcccagcaccagaccgaacgttgcacaggccatcgccacttccgtcgcattggtgaagccataacgttcaatgaacaatttactccacgcagcgcccgtaccgtgaccgccggaaagagtaatagaaccggccaacagccccatcagcggatcaagccctaacaagctagccataccaatgccaatggcattttgcatcaccaacagaccaacaaccacaatcaagaagatgccaaccacacgcccaccggcacgcaaactggcaatgttggcgttcaggccaatggtggcgaagaaagccagcattaacggatcgcgcagggacatatcaaagttgacttcccagcccatgctttttttcagtactagtagcgccagcgccaccaacaaaccacccgcaacaggttccggtatggtgtatttcttcaaaaaggagacggaatggaccaacttacgcccgagcagcaacgtcagcgttgcggcaacaagcgttgctaaagtatcgagatgaaacatagttactcctttgtatccgcatcactctttcatactcgtcatacttcatcgcgcagtggcaacttcatgaactatgacgggtatcgagttatgctttcctgggtcaaattctcagctgttaatgaacaaatggcatggattttaagcagaaaaataccaaaagttatataaaaaagtgcatttatctcatttaaatatttagatgaggatgtggcaaacgtttgcttttctctttcggtcagctaaaatgcccgctttgctaccacgggattgttttcgatgtctgtttccaccctcgagagtgaaaatgcgcaaccggttgcgcagactcaaaacagcgaactgatttaccgtcttgaagatcgtccgccgcttcctcaaaccctgtttgccgcctgtcagcatctgctggcgatgttcgttgcggtgatcacgccagcgctattaatctgccaggcgctgggtttaccggcacaagacacgcaacacattattagtatgagcctgtttgcctccggtgtggcaagcattattcaaattaaggcctggggtccggttggctccgggctgttgtctattcagggcaccagcttcaactttgttgccccgctgattatgggcggtaccgcgctgaaaaccggtggtgctgatgttcctaccatgatggcggctttgttcggcacgttgatgctggcaagttgcaccgagatggtgatctcccgcgttctgcatctggcgcgccgcattattacgccgctggtttctggcgttgtggtgatgattatcggcctgagcctaattcaggttgggttaacgtccattggcggcggttacgcagccatgagcgataacaccttcggcgcaccgaaaaatctgctgctggcaggcgtggtcttagccttaattatcctgcttaaccgtcaacgtaacccttacttacgcgtggccagtctggtaattgcgatggcggccggatatgcgctggcgtggtttatgggcatgttgccagaaagcaacgaacctatgacgcaagaactgattatggtgccaacgccgctctattacggtcttggcattgaatggagtctgctgctgccgctgatgctggtctttatgatcactagcctggaaaccattggcgatatcacggcgacctctgacgtttccgaacagccagtgtccggtccgctgtacatgaaacgcctgaaaggcggcgtgctggcaaacggcctgaacagctttgttagcgcggtgtttaacaccttcccgaactcctgcttcgggcaaaacaacggagtgatccagttgactggtgttgccagccgctatgtcggttttgtcgtcgcgctgatgttgatcgtgctgggtctgttcccggcagtgagcggttttgtacaacacattccagaaccggttctgggcggcgcaacgcttgtaatgtttggcaccatcgccgcctccggtgtgcgtatcgtttctcgtgagccgctgaaccgtcgggcgattctgattatcgcgctgagcctggcggttggtctgggcgtgtctcagcagccgctgattttgcagtttgcccctgaatggctgaaaaacctgctctcctccgggatcgccgcgggcggtattactgccatcgtgctgaatctgattttcccaccagaaaaacagtaattcactggcggcggtaagataattaccgccgcagtctcacctctttaaccattcccgccttgaggattgcgcgtaaatcgtgcataactcccttatgtgcatttcacgggatggaagaccatgaaatttattgggaagctgcttctctacattctcatcgctctgttagtggcgatcgctggcctctattttcttctgcaaacccgctggggagcagaacatatcagcgcatgggtttccgagaatagcgactatcatctggccttcggggcgatggatcaccgtttttccgcgccatctcatatcgtgctggagaacgtcacgtttggtcgtgatggccagcccgcgaccctggtggccaaaagtgtcgacattgcgctaagcagtcggcaactgaccgaaccacgccatgtcgataccatcctgctggaaaacgggacgctgaatctcaccgaccagaccgcgccgctaccgttcaaagccgatcgtctgcaactgcgtgatatggcgtttaatagcccgaatagcgaatggaaactgagcgcgcagcgggtaaatggcggcgtagttccgtggagtccaaaagccggtaaagtgctgggtacgaaggcgcagattcagtttagtgccggaagccttagcctcaatgatgttcctgccaccaatgtactgattgaaggcagtattgataacgatcgcgttacgctgactaacctgggtgccgacatcgcccgcgggacattaaccggaaacgcgcagcgtaacgccgacggcagctggcaagtggaaaacctgcgcatggcggatatacgtctacaaagcgaaaaaagcctaaccgacttctttgcgccattacgctctgtcccgagcttgcagattggtcgcctggaagtgatcgatgctcgtttgcaaggtccggactgggcggtgaccgacctcgatctcagcttgcgcaacatgaccttcagtaaagatgactggcagacacaggaaggcaaactgagcatgaacgctagcgagttcatttatggtagcctgcatttatttgacccgattataaacacggaattttccccgcagggcgtagcgctgcgccagttcaccagccgctgggaagggggtatggtcagaacgagtgggaactggctgcgtgacgggaaaacgttgatccttgatgatgcggcaattgccgggctggaatataccttgccgaaaaactggcaacagttgtggatggaaacgacacccggttggttaaacagcctgcaactgaagagatttagcgccagccgcaatctgatcattgatatcgaccctgacttcccgtggcagctcaccgcgctcgatggttacggtgccaacctgacgctggttaccgatcataaatggggcgtctggagtggcagcgcgaatctgaatgccgccgccgcgacattcaatcgtgttgatgttcgtcgcccgagcctggcgctgaccgccaacagcagcacggtgaatatcagcgaactgagtgcatttactgaaaaaggcattctggaagccaccgccagtgttagtcaaacgccacaacgtcagacacatatcagcctgaatggacgcggtgtgccggtgaatattttgcaacagtggggatggcctgaattaccgttgactggcgacggcaatattcagcttaccgccagtggcgatattcaggccaatgtcccgttgaaacctacggttagcgggcaattgcatgccgtgaacgccgcaaagcagcaagtgactcaaaccatgaatgctggcatcgtttccagcggtgaagttacaagcacggagccggtgcggtaaacatcaatctcgccgggtacgactcagacgtacccggcattccatcaatagattacaacgtaattgtcagcgcattcccttgaggcttcaccaccagcccctgctcactttcagcctggctaccgtcttgcagaccatttactttcacaacattgcgcaggcacagtgtccagttcttcgcctcgcccgcaccagtcacagtaatcgtgttgccagtacgtgctgcttttaaagtaaagatcacgcttccgtcagcagcgggcacttcacagacggcttcatgcccgtcttgcagattgaagaggtggaatgccgtgccttcgtgccacacgtaatcgggacgttgatcgttgttgcccagcgccagtagagtgttatcacgcacataaacgggcagactcaggaagccgtgctgctgtttatgccagcgactaccgtcgagttcatcgttgtgccacaggtgtgtccagcgaccttccggcaggtagaactgcacatcgcccgcttcagtgaacaccggcgcaaccatcacgttgtcgcctaacatgtattgacggtcaaggtaatcacaagccggatcgtccgggaactccatcatcatggcccgcatcatcggcgtaccccgcgcgttcgcacgcgcagcttcacgatacagatacggcatcatgcggcatttcagttgcgtgaagaagcgcaccacatcacaggactcatcatcgtaggcccacggcacacgataagatttgctaccgtgtaaacggctatggctggagagcaaaccaaacgcgcaccagcgtttgtaaacgtgcgccggagcggtattttcaaagccgccgatatcgtggctccagaagccaaaaccactaaggccaatagacaaaccaccgcgcaggctttccgccatactttcgtagttagcgtaacaatcgccaccccagtgtaccgggaatttctgcgcaccgacggaggcgctgcgggcaaacaagacagcttcttcctcaccaacggtgtccttgagcacgttccacaccagttcgttgtagatgtacgcataatggttatgcattttctgcggatcggaaccgtcaaaccactgaacatcagttgggatacgttcgccaaagtcggtcttaaagcaatcaacgcccatcgcgaccagacctttcagtttgtcggcgtaccatttgcaggcatccggattggtaaagtcataaatcgccagacctggctgccatttatcccactgccataggctaccgtccgggcgtttgagtaaatagcctttctcttgtaactctttaaagacgggggatttttgaccgatataggggttaatccagacgcagattttcagtcctttcgctttcaggcggcggatcatcccttccgggtcagggaaagtcagcgggtcccactcaaaatcgcaccactggaaggctttcatccagaaacagtcaaagtggaaaacatgcagcggcagattgcgttccgccataccatcgataaagctgtttaccgtcgcttcgtcgtagttggtggtaaaactagtggttagccacaggccgaaggaccacgcgggcggcagcgccggacgaccagtaaagcgggtataacgatcaagtaccgctttcggcgtcgggccgtcgataacaaagtattcgagatattcactctcaacgctgaactgcactttggagactttctcgcttcccacttcaaaagagacacactggggatgattgaccagtaccccataaccacggttagtcatgtagaacgggatatttttatacgcctgttcagtacttgtgccgccgtcccggttccaggtctctaccgtctggccattgcgcaccagggcagtaaagcgctctcccagaccgtaaactgtttcgccaacgccaagatcaagccgctcaaacatataattgcgttgattattcgtgtcctgcacgtagccattatttttcacctgactaccggtaatacgttcgccgttgcgcagaaaatccagactccagaactcacctttgctgacacgcgcgcttaagttgccacttttaaactcagcataacgttctgtgttttcgattgtgaccttcacgtcctgcaaaatattgagcggataatgaggaccgttattcagcgccccctgaaaatgctcaatccgcacaccgacaataccttcctgtggggagaaaaagcgcaacgtaaataaaggcgtatcaagctgccaggtacgttcacgcacatcacggggggcagcatagaccaccatttcattatcctgctgttcaacctcgaacacctgaagcgggtgaatcaaattgaggccaggttgaatcaaccagtttccatcgctaattttcattgccgttccttagttctgcacttcttgagaggtgaattgttgctggcaacggcgtttaccctgagccagctgttccataacggttttcagattgtgcgtcgtgagactgtagtagcgtttagcgataatcgcgctcagcaaataacagatcgccggaacaatcgtgaatagcgcaataatgatgctaatcgtggcgctgttctgcgctttttctgccgcatcatatccgccataagccagcatccagccgataagagcgccgccgaaggccaaccccagtttgagcacaaacagcgtgccagcaaaactgatcccggtcaggcgtttaccattgcaccactcgccgtagtcgacggtatcggacatcattacccactggataggtgtcaccagttgatgcaacacaccaatcacgaagatgaagacaaacatagtgatgctggcctgcatgggaacaaagaacatcgcgaggctaatcactgccagcagggcgttcgtccaccagaagatagtgactttacatttccagtcggtcagaggttttgccagtgcggaaccaatcaggttacccacgcaataagtggtgagaaaagcgacaaacacttccggcgtgcccaaaatccatgtgacgtaatacatcatcgccccaccgcgtacgcacaccgccaggatattgaaaatggttagtaaaccgacaatccgccactggtcgttttgccagatatcacgtaaatcttcccgcatagacgttgttgtaggtggtgcttcaacgcgttctttagtggtgaagaaacaaaatgccagcatcatgaatgccaccacggaaaggaccgcgataccgccctggaaaccgagtggtttattatcaccgccaattaaattaaccagtggcatcatcagaacagtagaaagcatgcctcccgcggtcgccagcacaaaacgccaggattgcaggctgatacgctgagtcgggtcattggtgattacaccacccaatgcgcagtaagggatattgacgacggtataaagtaaggtaagtagggtgtaagtaattgctgcatagatcattttgccgttcatactgagatctggcgtgctataggccagtacacagacgatcccgaatggcagtgcgccaaacagtacccacggacgaaatttaccccagcgagagcgcgttcgatcggccaacaaccccatgcaaggatcggaaatcgcatccagtgcacgagcgaccaaaaacatggttccgacaaaaccggcaggaatgccaaaaatatcggtataaaagaacatcatatataacattacgttatcgaaaataatgtggctggcggcgtctcccatgccataaccaattttctctttaacggacaacacttcactcttcatctgcttttccttgatgctataggggtgctgagaccgataacgcattttgtaaaccatccctgtgagagcgaatattccgatatctggttattaatttatgattcttgttttatgtgatcgtggtagcgttaattccgctcatatatcattgtaaaatatgggttttatatgaactataatgctttcgtgataatacgctgcgtgtattaggcggaaaaaactgatctgggggatgtagaaactcaaggaagtagctataatgcgccccgcctccatgtagcaatcgaggcgcggaagatcgtcgtctccggtgaggcggctggacttcaaatccagttggggccgccagcggtcccgggcaggttcgactcctgtgatcttccgccaaaatgcctctcctgacgttctccaaccccttgtaatactgtcaatccagatattttctactgctcaatattcaatcggcttcaggaatacctggtctaaggttttgtgatggacgatgagcggctgaagaatccgcctgtcggttcttctgtcctcgaacgcatccgcgatattcacgccagtatgcgccgtgtttatttgcaggtgatttgcccccctgctgactctcagccaactgtatcgccattaaggtgaagatgttgttttactcgccccagaacacccttttttatacgactattctatttctttaaccgctggcgaaaaaaactgactataaacttcaccaataatcagactgccatcaagattaatttgttcatttaatatatcaaatcaacttgttttatttttactatcaaaaatagctcattgccttactataattaatatataaattcggtaattaattcttaacatgcttttactaataatctcaattgctggccctataatattgcgctagcattgctttctggttgtatcagcgatactcaaaaattcttaatacaatactcattcgactggtacttatttgtaactcagttatattttttcgcccggtgattcagaagaatgcaaaaaacggctaccactccaagtaaaatacttgatctcactgccgcggcatttttacttgtcgcctttctgacgggtattgcgggcgctcttcagactcctaccctaagtatattcctcgcagatgaactgaaagcccgtcctataatggtaggttttttcttcaccggtagcgctattatgggaattctggtcagtcaatttctggcaaggcactccgataaacaaggcgaccgtaaattactgattctgctatgttgcttatttggagtgctggcctgcacgctttttgcgtggaatcgcaactacttcattctcctcagtacgggcgtacttctgagtagttttgcttccaccgcaaacccgcaaatgttcgccctcgcccgtgaacacgccgacagaacaggccgtgagacggtcatgttcagtacatttttacgtgctcagatcagccttgcctgggttatcgggccaccgctcgcttatgaactggcaatgggatttagttttaaagtgatgtatctcaccgctgccatcgcatttgttgtttgcggactgatagtctggttgtttttgccaagtatacaaagaaatattcctgtcgttacccaacccgtagaaattttaccctccacccacaggaagcgggatacgcggctactttttgtggtctgtagtatgatgtgggcggcgaataatctctacatgataaatatgccgctatttattattgatgaactgcatctaaccgataaactgactggagaaatgattggtatcgctgccggtctggaaattccgatgatgttaatcgcaggctattacatgaaacgtattggcaagcgactattaatgctcattgctatcgtgagtggaatgtgtttttacgccagcgtactcatggcgacgactccggcggttgagctggaattgcaaattcttaatgccatcttccttggtattctctgtggtatcggcatgctttattttcaggacttgatgcctgaaaaaataggctctgcgacaacgttatatgcaaatactagtcgcgtcggctggattatcgccggctctgttgacggaattatggttgaaatctggagctaccatgcgttgttctggctggcgatagggatgttgggtattgcgatgatttgcctgctgtttattaaagatatttaactcaccagtctgggctaagaaaaatcggcgtggcgcaaacagagccatcctcgccatttttgctatcatgcctgcatacataaacgacaaaacagtatgcagagggaaaaatgggttccaccagaaaggggatgctgaacgttctgattgccgccgtgttgtggggaagtagtggggtctgcgcgcaatacatcatggagcaaagccagatgagcagccagtttttgactatgacgcgtttgatattcgccggtttgattctactgacgctgagttttgttcatggcgataaaatcttttctattattaacaatcataaagatgccattagcctgctgattttttccgtggttggcgcgctaactgtacagctcacttttttgctaaccatcgaaaaaagcaacgcagccacggcaacggtgctgcaattcctcagtccgacgattatcgtcgcctggttcagtctggtgcgtaaaagccgcccgggcattctggttttctgcgctattttgacaagcctggtcgggacttttttattggtgacacacggtaatccgacgagtttaagcatctctcctgccgcgttgttctggggcattgccagcgcatttgctgctgcattctataccacctatcccagtacgctaattgcccgctatggcacgttaccagtcgtcggctggagtatgctgattggcggtctgattctgttgcctttttatgccagacaaggaacaaactttgtcgttaacggcagtttgattctggcgtttttttatttggtggtcattggtacgtccctgacatttagtctgtacctgaaaggagcacaattaattggcggtccaaaagccagcattttgagctgtgcagaaccattaagtagcgcgctactctctttgctgttgctggggatcacgttcacattaccggactggctgggaacgctgctgattctgagtagcgtgattttgattagtatggattcccgtcgccgcgccagaaaaataaatcgtccggcgcggcataagtgagaattaccagccaggcaccgcgccaccgttaaaaatggtttctgccgctttagcgacttcgggactttgataagattgcagaaattccttcacgttttctgcattcttattatcttcccgtgccaccaaaatattcacatacgggctattcttatcttcaataaatacgctgtcgtgcaccggagaaagcccggtctgctgaatgtaagtggtgctgataatcgctacatcaactttgggatcatccagtacgcgcgggagctgcgccccctcgagttccataatctgcaaatgacgaggattatcggttatatccagcgcggtaggtaataacccttttccctctttcagagtaattagcttctctttttgcaacagtaaaagtgcgcgaccaaggttggtcgggtcgttggggatcgccactgtcgcgccttcttttatttgcgccacggttttgatttttttggaataacccgccatagggaagacaaacgtatttcccaccgctaccagtttataaccatgcgcctgattatcttgttcaagaaagggtcgatgctggaagacattcgcatcaagttcgccatgatttgtcgcatcgttcggtagcaagctaccgctaaatcctaccagttcaacatcgaggccatatttctcttttgccacctttttagcgacttccgcgacatcttgttctgcgccatttataacgccaactttaatgtgttttgcatcgctgctactctggtcgcaacctgccagcagaattccggccagcaataatgcggcccctgtccgtagatgatgtgttgtcagtttcatttttttatccttttattaatgattacctgactatagcggtaaggtcgctgcggtttaaaaaacgaaacgctatcgataagaataaaaaggaataaaagtggaatataaagtctggcacttcttactgaccacgcaagcgcgtttcgtacagcatgatgagagcgatgaaagcaaactacacttatgcttcattcgatacacatttgtaaaaggttgaatccatgaaaccaacgacactactgcttattttcacttttttcgctatgccaggcatcgtatacgccgagagcccttttagcagtctgcagtccgcaaaagagaaaaccacggtattacaagatttacgtaaaatttgcacgccacaggcgagtttaagtgatgaagcgtgggaaaagttaatgttgagtgatgaaaacaataaacaacatatacgcgaggccatcgtggcgatggaacgtaataatcagagcaattattgggaagcgttgggtaaggtagaatgcccggatatgtaagaacagcaacaactactgaccaacgcttctttacctgatatcaggatttcttcattttcacctttgcagtaaccaacaatgcagtcagcaacatcaatgtgccggacaacatcaacgggctagtcagaccaatattatccagcgcataaccgccgattgccgcgccacaggtattagcaagctgaataaccgccacctgaatagacccggctttttctgcctgatcggccaggctgcgggtgatccacgtactccagccgacgggaaccaatgcaaaagttagcccccagataatcgccacgccggtagcaacgattttatcgcttccccacaacgtcagtaccaacgcactcacagccagtattaacggcgcgcctgctaaggccagttttacgctacgtttaagaatgaagctgctaaggctcgtaccaataaagctggcgataccaaaactcaacagcaccagcgttaagccatccacgccgaatcccgccaggttcatatacaccgggcgaatatacgtgaagaaagcaaactgcccggcgaaagacatgaagatggcgatcatccctgccatcacacccggacgttgtaataagcggaaagtattttgtttctgatggctgggttcgcctggcagactaggcaaacttttgataatccagaaaatacacagcacgcccatcaccgccgccgcattaaagacattgcgccaaccgataagctcgcctaaaaaactgcccaacggcgcggcaatcaccagcgcaatagaaaccgcgccgaagatcacgctcagcgccttcggcaccgtacgcggcggcaccagacgcatggtcaggctcgcgctcatcgcccagaacccgcccagcgccagccccagacaggcacgaccgattaaaagcaaactgaaactgttagcaaaggaaaccagcaagcaggagagcgtcagcaaaacggcaaacaaaataacaacgtagcggcggtcagtagcctgaattgtctgggtaataaacaaactggcaaacattgccacaaaggcggtcacggtcacgctttgcccggcaaccccttcgctaatgcctaaatcctgggccattggcgtcaacaaactgacgggcaaaaactcaacgataatcagacaggcgacacaaaacgccacgctgaaaacggcactccagttcggtcgggtgatggcatccgcgccgcggttttcggcaataaattcactcatggtgttacccgtggcatgtttcaggggaaaagcgctccactttaacatactaatgtgactcgcatttaacgtttttgcaacttttacggtgttgctactgctggagttaagatcgaaacggaacagggcaaagattaccggatgcggcgtgaacgtcttatccacccgacaggtcaggcgcggtctgtaggctgataagacgaaacggtttcaatgcaaccagtgaacgccctcggcaggctgaaagaacgcgttatagcgcatctgaaaagcattaatatcctgcatttcaggttcggtttcgcgcagaaaacctagcgccagcctgacctgagcgtcggtaatcggcgcggcgaggcgagctttttgtaaaatccgatgccattgcagcaggttctgttcgctaccatcgacaatgacaatttgccagatgagcaacacctgcgcggcgttttgcaggtggctctcatccggacgatgcaaataacgtaaaaattcgtcaccagcactctttcccatttgatcgaccatgctctccacgggtacgacatcgatgttcagccgatcgctgagacggcgaatcgcttttctggccccggatgtcagcacccgaaaaccaaccacaaacactaccgccagcgtggcgagcattatccagatcatgagttctcctgcgtaatcagaactcatgatatctggaaaccctcgccagttattaatccaccagaataatcttcagtgcaaacagagctgcgaccaccaccacacacaggttcagatcgcgccagcgcccggtgcatactttcatgatgcagtagctcataaagccgagtgcaatcccttcggtgatgctgaaagtaaagggcatcatcaccgtggtaataaacgcaggcacgctttcggtaaaatcatcccagttaacgcgcgccaggctgctagtcatcagcacgccaacaaagattaacgctccggcggttgcgtaaggaggaactatcgccaccagcggactgaagaacataaccaacaggaacataacgccaaccacaaccgcagtcagccccgtgcggccaccgactgccacaccagaagtactttcaatataggcagtaacagagctggtgccgataaacgcacccgccacgctactgacgctatcaacatacagcgccttattcatattggggaatttaccgttaccatctattaagcccgctttatcagttacaccaattaatgttccactactatcaaataggttgatcagcataaaggagaaaatgataccggcgagttcaagtgttaacgcgccgctcaaatctacttcaccaatgacgccgctaatatcaggcggaatggaatagacgccgctaaaatgaacatcaccgaaaaataatccacagcaagacgtcaccacaatagaaaccagcaccgcggcatgaaaatgacgactactcaacacggttataataaaaaaccctaaaatacctaacaacacgccgtgagaacttaaatcgccaatcatcaccagcgtgtctttattggcgacaataacgccagtattttttaatcccattaaggcgataaataatccaattccgctggtgataccaatacgtaaacttaagggaatgttggagatcatccagtaccggatacgaaacagcgtgagcaaaaatagtccaactgcgccccagaatattgcgcccatcccggtctgccaggagatgcccatcgcccccacgaccacgaaggcaaagaaggcgttcagccccattgccggagccagcgccacgggtaagttagcaaatatccccatcgcaatactgccgataccggcaatcaaacaggtggtaacaaacaccactttcgggtccatttgtgccgcgccgaggatttgcgggttcacaaaaacgatgtacaccatggttaaaaaagtggtcatccccgcaatcaattctgtgcggacggtggtcccatgctgaggtagtttaaataatcggctaagcgtcccactttcattactcacgtaatcggtattgtcattattcatttttttgtccattggaggagatttaatcccttgcttttgtaaaacaaatgacaacaacggttcagtgataattatcacatttcaattgcacattaatggatattctttaataatctcgcgacgtttctttatgataaataataatcaaattgataaaatcaaaatgagaaaaatatgaataattctattaaccataaatttcatcacattagccgggctgaataccaggaattgttagccgtttcccgtggcgacgctgttgccgattatattattgataatgtctctattctcgacctgatcaatggcggagaaatttccggcccaattgtgattaaaggacgttacattgccggtgttggcgcagaatacactgatgctccggctttgcagcggattgatgctcgcggcgcaacggcggtgccagggtttattgatgctcacctgcatattgaatccagcatgatgacgccggtcacttttgaaaccgctaccctgccgcgcggcctgacgaccgttatttgcgaccctcatgaaatcgtcaacgtgatgggcgaagccggattcgcctggtttgcccgctgtgccgaacaggcaaggcaaaaccagtacttacaggtcagctcttgcgtacccgccctggaaggctgcgatgttaacggtgccagttttacccttgaacagatgctcgcctggcgggaccatccgcaggttaccggccttgcagaaatgatggactaccctggcgtaattagcgggcagaatgcgctgctcgataaactggatgcatttcgccacctgacgctggacggtcactgcccgggtttgggtggtaaagaacttaacgcctatattactgcgggtattgaaaactgccacgaaagttatcagctggaagaaggacgccggaaattacaactcggcatgagcttgatgatccgcgaagggtccgctgcccgcaatctcaacgcgctggcaccgttgatcaacgaatttaacagcccgcaatgcatgctctgtaccgatgaccgtaacccgtgggagatcgcccatgaaggacacatcgatgccttaattcgccgcctgatcgaacaacacaatgtgccgctgcatgtggcatatcgcgtcgccagctggagcacggcgcgccactttggtctgaatcacctcggcttactggcacccggcaagcaggccgatatcgtcctgttgagcgatgcgcgtaaggtcacggtgcagcaggtactggtgaaaggcgagccgattgatgcgcaaaccttacaggcggaagagagcgcgagactggcacaatccgctccgccatatggcaacaccattgcccgccagccagtttccgccagcgactttgccctgcaatttacgcccggaaaacgctatcgggtcattgacgtcatccataacgaattgattacgcactcccactccagcgtctacagcgaaaatggttttgatcgcgatgatgtgagctttattgccgtacttgagcgttacgggcaacggctggctccggcttgtggtttgcttggcggctttggactgaatgaaggtgcgctggctgcgacggtcagccatgacagccataatattgtggtgatcggtcgcagtgccgaagagatggcgctggcggtcaatcaggtgattcaggatggcggcgggctgtgcgtggtacgtaacggccaggtacaaagtcatctgccgttacccattgccgggctgatgagcaccgacacggcgcagagcctggcggaacaaattgacgccttgaaagccgccgcccgtgaatgcggtccgttacccgatgagccgtttattcagatggcgtttctttctctgccagtgatccccgcgctaaaactaaccagtcaggggctatttgatggcgagaagtttgccttcactacgctggaagtcacggaataataaaaaaagcccggcgtcatgccgggcaaaagtcaccagttacgtttatgccactgtcaactgctgaatttttttctcgcggcggattttgcgttcttccattaccgccactatcgccatcaggcagatacaaccaatcgcggcgatatccagcgcggcgaaggtgcctgcccagccggtaaggccgaataccggcgtcccatcggcaatcattcccagacctaacttggcaaagctgtcaccaatcaggtaagcaaaggtgcctttaataccatcggcagcgccaatcgcttttttaggtacaaagccaacagcagccacaccaatcaacaattgcgggccaaagaccaggaaacccaacgcaaagagagaagccagatagatatattcgttactggcatgttgatacacaccgagcgtggcgataatcagcgccagcgcgatgcaggccaccaggccacggcgaccgttcgccaggtcagagagccagccccacagcagcgtaccgaccagcgcaccagcttcaaacagcgtaaagccctgaatcgccaccgctttagagagtttcagttcctggaacgcgtatacggtactccactggtcgataccaatacgtaccacatagaggaaaatgttggcgaagcacagcagccagatcactttgtttttcagcacatactcaacaaagatctgccacttggtcatatcggtagattctgtctctttgtcctcttcgctgatctcctcgccgaacagttcttcagctttgccgaggccataagattccggggagtcgctgccgtaacgcaggccgataaaaccgacaatcagcgcgataatgctcgggaagataaacatgccgatgacatggccatcgaacaggtaatttgccccgaacagcgccacacctgctgcgcctgcaccgccaaggttgtgagaaatattccagaaaccgaggaatgtcccgcgtttacgacgcggcgtccatttggtgatggtggagtaactgcagctaccgccggtactctggaaaagccgcttaaggcgtagaaggcaatcatcaggaacaggctaacgctgccgctgcccatactggcactgaagcccagcatacaaatagcagagaggatcagcatgaacggcaggaattgtttggtgtttttgccgtcggcgtagtaggaaaccagcgttttacccacgccataagtgatggagaaacccaggccgatcatccccagctgcgtcatgctcaacccgtaggtgctaatcatatcgttctgcgcgatgttaaagttcttgcgaatcaggtacatcgtcaggtagccgataaagaccaccaggtaggattgcatgaacggtttgaaccacattttgcgccgcacttcgagcggaaggtccagggtcggcttgcgaacctggtttaagaaagccagcatgggttactcctgaaatgaatacctgcgtgaggcatgcattgtaaaaatcagcagcaaatcaggcctgagatagcgtccaggcaaaacctggaaaatttcttagttttgccggatatgaagtgaaaaggtgagatgcatcacgcttcgcgcggtgtctgggcgttcaaaaagggcagtaacagcagtgcggaaatcccggcggcgatagagataaccacaaaaaatccgctccagtgccaggtatcgagtactttcgccagcggccaaccagcaaggctcgcccccagataagcaaacaagccgacaaaccccgtcgccgcccctgccgcctctttgtgggaacactctgccgccgccataccgattaacatctgtgggccaaagacaaaaaaaccaatggtgaagaagcaggttgcctgcatcacgtagctggcaaatggcatcagccacagggagccgacactaagcaaaattccggcggcgaaaatcaaattcatcggccctcggttgccgttaaacaatttgtcgctgccccaaccggctaccagcgcaccgataaatccgcccagttcaaacatcgtcactgccgtattcgccgtgaccagatcgacgcccagtgtctcggacatatacaaattgccccagtcgttgatcgccgcccggaccacatagaccagcacatagcaaaagctaagcagccagatatacggattcagcaacacatatttggtgaggatctctttacgcgtcaaccctgccccttcttgttgttgagcaatttccagcgcgtcgtgtcgccattcaccgaccgccggtaaacctaacgcctgcgggcgatcgcgtagccgccagcagagaaaaatccccacgactatcgccatacaaccagcaatcatcatcccggcacgccagccgtaatgcagcgcagccgctgccatcacaatgggaatgagtgcgccgccgacgttatgcgccgtgttccataatgcccaccaaccgccgcgctcggtacgactataccaggccgttaacagacgcgcacacaccggactaccccagccctggaaaaaggcgttcagcacccagagcacggcaaacgcccataggctcgtgctgaagccaaacagaatgttgataatgcccgtggcgataagccctatccccataaaataacgggcattactgcgatcgctgacaatgccggagacaaacttgctcacgccataggtaatgtaaaacagggtcgctaacaggccgatatcgctacggctgagcacgccgttagcaaggatttctggtacggcggcgttaaaacttttccgcgtgaagtaaaacagcgcgtaacccagccagatggtcagcagaatatgccgacgccagtagcgatagcgggcatcaatttcatatttatcagtcattaatggcgcatcggcaggcgctttcagaaacggcaacatcatcaaaccttagacatagcgttgaggtagagaaacgctgacacgcgtgccgtgcagacaggaaatgtgtaatgtgccacccagcgccgttacgcgctcgcgcattccggtgaggccaaaaccttgttgcccggaacccggcggcaaaccgctgccatcgtcttcaataaccagcatcaaccgttcatcctgctgccagccttgcagggtgaccgcgctggcatcagcatgtttcacaatgttgttcagcccttcctggcagacacgaaacagcgtcacgcgctggttttcgcttaacgcactttcatcgattcgccattcgagatggctgacaataccgcgcccttccagctccatttcccgcatcagactgcggatggcctgctccagggtgagatcatccaactggcgcggacgtaaccgacccaacaaacggcgcaccgcgtcgtaaacgcccaggcttagttgttcgatgagctgcccgctctgcttcacgctggcgttatctgccgccagccgctgaacaatgcccgcctgagtacgaatagcagtgatggtctgaccgatatcatcatgcagctcacgcgccacatcacggcgcacgctctcttcggtttccagcaaccgttcagccagatgctgattgcgcgccagttccttttgcaggctctggttaagttcacgcaaccgctggatgccagcgccaagcaacaaccctgtcagactttgcaccagcaggctgagcaataaatccaccggatgatcgcgccaggtttgactggcgatcagcgcgatggcgttcatcaacgtcgcaatcagcgccccttgccaaccatagtgccaggccagcgcgataatcggcagcgccagacagaatggcgtaaagcggctcagttcgtccggcaatcccaactggagccagagactgataacaaacagcagcaagtaccagaccagatgtcgcccgcgccagttgattggctgagaaaccagactcggaccgagcggcagccaggtgttattggcgagatagtgccagaacaccagacatatcggggccagcgtcaggccgccagttaaagtcagcaacagcgcattccagctctctttgccgtgccaaagccagggcaggctctgcaacaacgccgccgccgttaacgccgccccctgtaacagcaaggtgcgccagtcacgctgatggcgatagcggctgatcagcgctacgggcagtaacgtcagtaaactaccgatcatcaataacggaaaatgggttaaaccgaccgcctgcgttagccagtaaatcagcagccactccgcgcccagcaatacgggccagtatccgcgcgggcattgcagcattagccccagacgcagaccaaacggaaataacagcaccgccatatcagggcgctcaaccagatgcaggctgatactccacaggcaaaaccatgcggcagagaagataaaaaagcaggcaataacggtaattaagcgggagaacaacgtcttcatcaccagccatcaaacatgcggcgcgccagctctacgtcgttactgacgcccagtttttccatcagattggcgcgatggacgtgtaccgttttcggactcaagcccagttcggcggcaatctctttcaccgccattccttgcgccagtttttccgccacctggcgttcacgtttggttagcgggtcctgacgaccggatgccagtttaatggcaatatccggcgtcagataacagccgcccgtggcaaccgtatgcaccgcagcaatgagttcatccgggctacagcgtttggaaagaaagccgcgtgcccccgcgttaagcgcctgctcaaccagcgcaggactgtcgtgaacggagagcataatcgtcgccatacctttcggcagctggcttagcagctccagaccggagatatcgggcatggagatatcgcaaatacacacctgcacaccgcgccccggcagccccgccagcgcctcgcgcccgctaccaaactcggcaactacctgcaaatcaggttccagccccagcagctgcgcaaagccggagcggacgatgaggtgatcgtctataagggcaacggtgatcatggtcttgtcctggcgggtaaaaaaaatacgcgcttaccttaacgataagcgcgatgttgttcaagccttgagcggttactgaaaaaacaccgcgatcttgttaaacatcgtcggatcggactgattacgctgcactttcacgacatcttccagcttatcgatttggcttatcatctgctccagacgctggtcgtcattgaccagtagccagatatggcttttgtcgctgtcctgaatcggcagacaaagaatgccttcaacgttaaaagcgcggcgggcaaaaaggccacaaacgtgggtcattacgcccggatggttgcgaacggtgagctccagaattacgttgtcatgagttgtgttttgcatggcttattcccccaccatttcagtattcgccgcacctggcggcaccatcgggtaaactttttcttcggcatcaatgcgcacatggatcagcgccgggccagggcgattgatgatttcctgcaaactagcctgcggatcggcttcgttattcaaatcacaggtttcgaggccgaatccggcggcaatctgcataaagttgattttgcccggataggtggcggcaaaaacgccttgctcgtagaacagactctgttgctgatgcaccagccccagcgcttcgttgttcatcagaatgattttgacatccagctgattttcactggcggtcgccatctcctgaatattcatcatcaggctgccgtcgccggagaaacacaacactttgcgatccgggttcgccagcgcagcgccaatcgccgcaggcaggccaaaacccatcgtgcccagcccaccggaggtcagccactggcgtgggcgattgagcggataagcttgcgcggtccacatctgatgctgaccaacgtcggtggtgataattgcattgtcatcgacacaggcggcaacggcgttgatcaggccgtaatggcttaacggatcgcacgctttcgggattggacacggaaactcacgctgcaaatccgctaccaactggtgccactctgcacgcggttgcgcttccaccagcgggatcaactgcgccagcacgtcatcaacatccgcctgaatcgccacgtgcggctgcttgattttacccagctctgcacggtcgatatcgacatgaatgattttggcattcggacagaactgctcggttttgccaatcgcccggtcatcaaaacgcgcaccgagcactatcaacaaatccgcctcctgcaaaatatagttggtgctgcgcacgccgtgcatccccagcatacccaggctcaacggatgcgcttttggcaacatgcccagcgccattaaagtcatggtggtaggcagttgcgctttctccgccagttcacgcacccgtgcgggcgcattgatcacaccgccgcccagataaagcaccgggcgtttggcagcgttaatcatcgccgctgcgtcacgaatgctttcttcgctaaaggcgggggcggcggctttttctgccatagcgggctgtgtttcaatctcaaaaactgccgtttgcacatccttaggaatgtctatccacaccgggcctgggcggccactttgcgcaatgcggaaggcatcgctcatgacctgcgggagttcttcgatatgtctgaccagatagttgtgtttggtgatggggatagagatgccgtaggtgtccacttcctggaaggcgtcggtgccgatcatgctggcgggaacctgaccagtgatgcaaatcagcgggatggagtccagccgcgcatcggcaatggcggtcaccaggttagtcgcacccggtccgctacaggccatacagaccgccggtttaccgtcggtgcgcgccattccctgagcgataaagcccgcgccctgttcatgacgggccagaatatggcggatttgcgtgctttggcttaaggcatcgtaaacaggcaggatagaaccgcccggaatgcctgtcacaatcttaatgccctgctgttccaggaaatgaacgataaattctgcgccggtaaagcgcttacgcgtgcttgttgtgccgctacttgccatgctccagtccttttcttctgggccgactttccgggaggtgcttaaacgaaaaaccccgcccggtttgcgccggcggggttttggaatcgtgtgttgttccagtccttacggcgcattgccgacgaccaccaccacacgcacgacgaccactgcggcggatggcgcagttggtagtagttttgcgttgagcatggaagtagtcattggggaccttgttggttttgtgtttaacaatatttatacaagcacagctttacaggggagacaatggaaaatttttcagcaagggaaaattgaggggttgatcacgttttgtactgaattgcagataacaaaaaaccccgccggagcgaggtttcgtcagtcgcctgcggctggtaaccgcaaagcacactgtattatgtcaacactgaaagtatacgtgttccgcgcagaacgcgcaatttcggcacgaattttgacgtatttagtgcatagttgagtatcgatcacagtttgcgttttgtccaaatattactgtttatttatacagtaaacttctataatatcactgtacgcaatgtgttatgcgggggccgcatcgttacccggcgcactaagttctggctgaaacgggtggtgccgtcagcgccttaaccccgcgtgagcacactgtgttatgtcaacaagcacaacgtttctccttgagataccgcgtgcacaacagctggcaacaggcagcggaaaggtacgtcagctggcagtgctcctgaaccacaggagacgcgtatgaacctggtggatatcgccattcttatcctcaaactcattgttgcagcactgcaactgcttgatgctgttctgaaatacctgaagtaattcagattcaagtcgcaccaaaggggagcgggaaaccgctccccttttatatttagcgtgcgggttggtgtcggatgcgatgctgacgcatcttatccgccctaccatctctcccggcaacatttattgccgcttttgtttacatattctgccgctaaacaattccccattcctggcgtatatctggctaacattcatcaatgtgatagattcctctcccgcatttatgggaatgcgtagtgacttattctaattatttttataaaagcatccgtgataatgaaaaggcaaagaaacgtcaatttgttattgatgttggtattactcgtggccgtcggtcagatggcgcaaaccatttatattccagctattgccgatatggcgcgcgatctcaacgtccgtgaaggggcggtgcagagcgtaatgggcgcttatctgctgacttacggtgtcagtcagctgttttatggcccgatttccgaccgcgtgggccgccgaccggtgatcctcgtcggaatgtccatttttatgctggcaacgctggtcgcggtcacgacctccagtttgacggtgttgattgccgccagcgcgatgcaggggatgggcaccggcgttggcggcgtaatggcgcgtactttaccgcgagatttatatgaacggacacagttgcgccatgctaacagcctgttaaacatggggattctcgtcagtccgttgctcgcaccgctaatcggcggtctgctggatacgatgtggaactggcgcgcctgttatctctttttgttggttctttgtgctggtgtgaccttcagtatggcccgctggatgccggaaacgcgtccggtcgatgcaccgcgcacgcgcctgcttaccagttataaaacgcttttcggtaacagcggttttaactgttatttgctgatgctgattggcggtctggccgggattgccgcctttgaagcctgctccggcgtgctgatgggcgcggtgttagggctgagcagtatgacggtcagtattttgtttattctgccgattccggcagcgttttttggcgcatggtttgccggacgtcccaataaacgcttctccacgttaatgtggcagagcgttatctgctgcctgctggctggcttgctgatgtggatccccgactggtttggcgtgatgaatgtctggacgctgctcgttcccgccgcgctgttctttttcggtgccgggatgctgtttccgctggcgaccagcggcgcgatggagccgttccccttcctggcgggcacggctggcgcgctggtcggcggtctgcaaaacattggttccggcgtgctggcgagcctctctgcgatgttgccgcaaaccggtcagggcagcctggggttgttgatgaccttaatgggattgttgatcgtgctgtgctggctgccgctggcgacgcggatgagccatcaggggcagcccgtttaagcgcacgtcaccgcagcatcgtcatcagctccatgggagaacgatgctgctttatcagatcacgcatcacccgcatatgcggtgcggagtaagaataaaacgcctgatagcccgcacaaagcacgctgtctggcgtctcctgccgagcgtgcgggcacaggcgatgccagtcgcacgcctggcagtcacagcgcggttgcgggttttcgctgccacaccatttttgtaaggtggcgtcaaaaagctcaatgctgatacgactgatatctgcccgcacccaacactcgaacagggcaattaaaaatttcccccacagctctgctgtcacgctagcggccgtcagatcgccccggtcatcaaattcaagatagggaatgagctgtacggagcggatgccccgctgtttgaaattgtgataaaaatcggcaggttgcagagcatccttgtactctacaaccagtttatgcctgtcctcttcagcatcaatgacctgacttcctgtcatgcgactctctcaataaatacgataagttgatgtatatgcgttacagcaaacagtattgcgagagataacaccgcgagggagatcaaaaatttgtcacggactacgtgaaattgggaaaaatcgctattcgtgacatccattaaattgcgattacgggtgtagtgccagaggatcagcgccacgatggcgagaatgccaatgctaatccagaataacatgcccgcctggtgccagttgtgtttgatagccaacgccatcaacgcgccgtagcccagcatggtacgaaaccacgccagacttgtgcgctccggctgcagtcctgggtcggcaatgcgtctggctttgcggctatccggcatacaacaccagtcccataacgttaattatccggcatacaacaccagtcccataacgatcaccgccacgaccatcaatattaagctaatgattaataagctgttggtgtagggcaggtcctctttcagacgcatcgctttttcattgcgtaaccagcgcaagtagccatacatcgctaacccgccggaaaacagacacaacaacaacgccagcagttcgcgaatgacgggcgtggcgaaatctggcgcaagttgatcaagcccaacccccgccgccagaaatcctagtgcagtacggatccacgccagaaaagtacgctcattagccaggctgaagcggtaatcaggcgcttctccgaggcgggaaattttcattgttgctcctttgcaatttcactaacgctctacctttagcggtttttttaagaatttcgtccgcccgtttcctgatatgcttttgccatccgctacaaggaggtcagatgggtatcatagctcaaaataaaatcagtagtttgggcatgctgttcggtgccatcgctttaatgatggggattatccactttagtttcggccctttctccgcaccaccgccaacgtttgaaagcatcgtggcggacaaaacggctgaaattaaaagaggtcttctcgccggaataaaaggcgaaaaaattaccaccgtggagaaaaaagaggacgtagatgtcgataaaatcctcaatcaaagcggtatcgcactggccattgctgcgctactttgcgcatttattggcggtatgcgtaaggaaaatcgctggggcattcgcggcgcgctggtttttggcggcgggacgctggctttccataccttgctttttggtatcggcatcgtgtgcagcattttgctgatattccttatcttttccttcctgaccggcggtagtctggtttaagcagcctgaataatgcccgccgggtgatcatcagcgggcattatcgtcagaacttctgttttttctcctccaccttcaccccttgtgtcggtaggccggtgtcatagtcgcgtacaactgggctatagccatcttgtggacgtggacgaaacgccccatccagcgcggccgtgcatctttacgccacggacgcagactccattggtaactgcggaacggatcgcgaattttgtccatgtaatccaataaggcgtcatgcattttgctgcgaacgtctgcaaaacggatatcatcgatcaggttatgcatttcatttgggtcattacggcgatcgtaaagttcatcactggtgaagaggttgagtaccagtttaaagtcatccgtcacccagcaacgcaccggaataaaaccgccaaagctgtcatgctcaatctcgtagcggttaaattccaccatcacgccgcgtggctctttcacggcaaggatattttcccccggcagaatctctggtttttcaatatctgccagcgccatcattgtcggcagtaaatcgatatgactgactggcgtatcgacctgtcgccgctccccttgcgggctacggatgatcagcggaatgcgggtgatgtcgtcatacatcgccgcccctttactgatcagcttatgtgcgcccatcatttcgccgtgatcggaggtataaataacccacgtattttcacgttgctctggcgttaaggcattgatgacccgtccgatttggtcatcaacaaagtcattacaggcaaaatagagcggatggtgataaagcccgtcatcaccgactgggcttggcatcgcctgcgcccataagcggtgatgttccggtttgttagccaggtcatcctgtgctttctcgcccagctcgtagtaaaaatcagcgtatttctctaaatactccaccggacaggtgaacgggtgatgcggctcatcatagctaaccaccatcaggaaaggctcgtctgcgcgcgcaggctgttgcagaaaatccaccgcccgattgctgatacgatgcgcccaggtgaaggtttcgtcgatatggttcgcctgtaaatcttcgacgctgtttaggccattgcgccacaggctaatctctttttccgtcagttcgctaagatagttcgccccatcgaaccagtaatcagcgtcccactccggcggacactcgccagtgccgaaatagtcatgaccgtcgagatgccatttgccgatgtaacaggtgtgatagccggcatccttaaagtagcgccccatagtggagatgtttttgcctggcgcgacgttgttggtccacgggccggactggttagcgtagataccggtaaatagtccggcccgtgcaggcgtacaaaccggactacaggtgtaggcggaattaaagcgaataccttccgccgccagactatcaatattttgcgtattcagcggtttaccgctatagcaaccgaccatattggtggcctgggtatcggtcatgacgaacagaaaattggggcgtttcataggctatccttcccgtcgggagtaaaggttacggctgggtcgtgacgatgccgccagctgtcaaaaatcaggtagacaatcactacggcggcaatgaaataactgatcatcgctaaccagcgcgtaccgtagccgccgaattcagccagcccggcatagacgccaatcatcgcgaacaggatgccaatactcgcgatcttgacgtttttccacggtttcatgtccaccgcaaacgcatctttgaaggtgaacggcgtggcgcgcggtttgataaaaccgatcaccagcatcacgaccacgttgatgcagaacgtacaggccagcacatagaggaaatggaagtcgaacttcaccagatagttgatggtgatgtagctgattatgccaatccccatcgctacttttgccgccagcgccgggatgcgcgggaagaaaaagcccataatgatgatggtaaccagcggcacgttgtaaatgccgttgagctgtttcatccagctatacagcccctgcggcgcgttggcgatccacggcgcgaccagcacgctaacgatagcgataaagaaaccaaatttgcgcccgacggtgaccagctgctgcggctcggcattctggttaatgatgcgacggtaaatacccatactgaataacgtactggcgctattcagaaagccgttgaaggtactgatcaccgcaccaaataacaccgcgccgaagaaacccaccattggcactggcagaacgttattgaccagcgtcgggtaggccatgtcggctttcggtaaatcctgatacagatgaaacgcaatcaaccctggcagcaccagtaccagcgggtcgagcattttcagcaccgccgttaacagcgcccccttttgcccttccgccaggcttttactcgccagcgtgcgttgcacgatgccctgatttgtacaccagtaaaaggtgttcaccagaatcaaaccggtaaatgccgcgccaatcggcaagggatcggtcgggccaccgatactgtttaatttctcggcgtgaacggtggtgagttgctcaatgccctgcataaagctgcccttgcccatcgcgattaggccaaataccggcaccatcaacccgccgataaccagcccaataccgttgatggagtccgccactgccattgcgcgcagtccgccgatcaccgcatacaaaattcccgccagaccaagcaaaattaccagtagccagatagccgcaccgtgagaaatctgtaggctttccccgacgtgaaacaggctgttgagcgccaacgcgccggagtagagaacaatcggcagaaagcagacgccggtggcaattaggaagcagaagtcgatgataatacgcgtcgttttatcataacgttcctccagaaaatcggggatggtggcaatgccgcgcttcagatagcgcggtaaaaagattagcgcgaggaagatcagcgtcaccgcactagtcacttcccagcccatcacgctcatgccgcttttgtaggcctgcccggaaaggccgaccagttgttccgtggaaaggttggttagcattaagctagcggcaataaccggcgcttttagactacgtccggcaagaaaatagccttgttggcttccggtatctgttttgcggaccttccaccaggtgatcaccgccaccagcagcgtaaaaccgacaaaactcaagatttgtaagctattcatctcatagcccttatttatgtttatgtcccggacgcatgaatatagggagaggtaaaatgcgtcgggtcaggcagtcagattcttaaaatacaaacgtcgtatccctgaacggattgttttctgttaagttcaggttgtgagcataattcgccggagggatattaaaatgaatggaaaattgcaaagtagtgatgtaaaaaacgaaactccgtacaatattcccttattgattaacgaaaatgtgatctccagcggaatttctctgatcagcctctggcatacctacgccgacgagcattaccgggtgatctggccgcgggacaagaagaaaccgcttatcgccaacagttgggttgcggtgtataccgtacaaggatgtgggaaaattcttttaaagaatggcgaacaaataacactgcatggcaactgtattatattcttaaagccaatggatattcactcttatcactgtgaaggtttagtctgggaacagtactggatggaatttacccccaccagtatgatggatattcccgttggtcagcaaagcgttatttataatggcgaaatttataatcaggaactcaccgaagttgctgagttaataactagtccagaagcaataaaaaataatctggcagtcgcttttctgacgaaaattatttatcagtggatttgtcttatgtacgcagatggtaaaaaagatccacaacggcggcaaattgaaaaattaattgccactttacatgccagtctgcaacaacgctggagcgtagctgatatggctgccacgatcccctgtagcgaagcctggttgcgtcgtctgtttttacgctataccggcaagacgccgaaagaatattacctcgatgcgcgtctggatctggcgctaagcctattaaagcaacaaggaaacagcgttggcgaagtcgctgatacgctcaacttcttcgactcctttcatttcagcaaagcctttaaacataaatttggttatgcgccgagtgccgtgctaaagaatacggaccagcacccaacggatgccagtccacacaattaacgtaactctggccagtacgctttgttggcctccagcaactcatccagaatagctttggcgacgctggcgctcggtaccgttttgctcaacgtaatcgcctgccacaggtgctgataactacgctgttcccaggcgtccacgaccagtttttccaccgccacttgctgactcattaaccctttctgaaactgcgggatatcgcgctccaccagtggttcaggccgtagtagcgcacgcgcatctgtttgcgatcttgcagcccaacaatttgcgccatccggctttcaataccgattggcatgtcacagatgttgaggattttcgcattcgggcgcagacgacgcgtggcttctgcgacaatggctgccgggttggagtagttgagcatccaggcatttggactatatttttccatataatccaccagttccaggacgccgccaatggaacgcatgccgtacgctattccgccgggtccgcaagtttcctgaccaacaacgccgtggcgcagcgggattttttcatccagttcgcgcatcgggtatttgccgacgcggatgtgcgccatgacaaaatcaacgtcgctgaatgccacttcaggatcggtggtgtaactaaacgcaatgtccggcgctttttctttaaggatgactttacaggcttcggcaatcacttcctgccgcgcaccatcgttatcataaaatttcagtgcacgaagcgggaaacggtcctgattcgccaggagcatcaacacgatgcctggcgtaaaggtgcttccaccgcctgcgacaaccacactgaatttggtcattatactgcctccgtaatggcaacattttctgcactttgatgagaattaattaagctatcgagctgttcacgcagctgagatacatgcagaccaatgatcacctgaatggcatcgccactacggaagacgccgtgcgctcccagctttttaaagacttcgtcatccagcgtttgactcatgtcatgcagtgcaatacgtaaacgcgtcgcgcaattgttaatgctggagatattgccgaccccgcccagggcttgcaggataccggcagcctgatccagctcttttttttggctctgccgcggtggtttggcctcggctggctttgtattcggctttactgtagagtttcacttccgcatcttcacgtcccggcgtgcacatgttgaactgcagaatcagtgtgcggaaaaccacgaagtacagcagggtaaagcacaacccaatggcgatttgggtcagcatcatatccgcgtggttgctgaacatcgggatccagttttgcggtaaaacttagtcaatcagacctccgcccatgttgcccaccacaccaaagagatacattacggtgctcatactggccgccagcacggcgtgtaccgcaaacagcaacggactaatgaacaggaaggtaaattccagcggttcggtaattcccaccagcatggcggttaaggttgcgggaatcagcaagcccgccacttttacccgattttccggtgcggcagtgaagtacatcgctaaagaaatgcccacggcaccaaagattttactgttaccgtgcagggcaaaaccgccttccgggaacaagcttttcagcggctcggcgctcaaactgaactcttgcagatgctgcgcccagtacatctgaatgccgccttcaacagctgccggaccaaagataaactgtccgtagatgaagtggtgtaaaccggttgggatcagaatacgttcgaggaaggtgtaaacccagaccccaagtgcacccgcgctacgcaggaacgcttgcagagattcaatccccatttgtacttttggccagccgagcaacgtcagccaggcacaggggatcatcaccaggaaggcgataatcaccacataagacgtcccctggaaaatgccgagaaaaaccggcagttttttatcgaacagacggttatgcagcgccgtcacaatgccggaaatgataattgcgccgataatgctggtatcgagggttttaatcccggccatcattgtcagaccgctacctgccaccgcgtcctgagtgaaatcgacgccgaagtagcttccccaggccattcccatcgcgttgatgaaatagttccaggtcaggaaactcaccatcaccgccagacaagcacgcccctgcgcttgcttagcaaggccaatgggtaaaccgacagcaaaaatcagcggcatattacggaataccgtccaaccgccctcttcaataatgtgtacgatttgcgcgaataaactgttcggatcggtcagactttccccgacaaacatcgggttttgcagcaagatggcaagacccaccacaatcccggcgaagggaaacagcagcactggcgtgaacatcgcgccgccaaagcgttgaatttgactgagcatttccacatcctcttttctcaattctgtaagtaggaagcctgattggttatgcggcaggcctggagcgaggataggaagatgcgatcggcagaacatgacgacccaatgggattcgtgatcgctttcatgcttttcgttgggcggtagagatctacgttttcgcgaaaaagtagacctctgtgagcacaggtacacagcatcgaacacatctttaaaaaaaagatgttttttcaatcgattaagcagaacttgtgtgcgcattacccgggcttgcaggcaaaaaagagatctagagatgatctacaaaagcattgcggagcggttaagaattcgacttaactccgcagatttcacgctaaacagccttcttcccggtgaaaaaaagctggcggaagagtttgcggtaagccggatgaccatccgtaaagccattgacctgctggtagcgtgggggctggtggtccgccgccacggtagtggcacttacctggtgcgcaaagatgtactgcatcaaaccgccagtctgaccgggctggtggaggtgttaaaacggcagggaaaaacggtcaccagccaggtgctgatttttgaaatcatgcctgcgcctccggccattgccagccagttacggattcaaatcaacgagcagatctacttctcccgtcgcgttcgttttgtggaagggaaaccgctgatgctggaagacagctatatgccggtaaaactgttccgtaatcttagcctgcaacatctggaagggagcaagtttgaatatattgaacaagagtgcgggattttgattggcggtaattatgaaagcctgacgccagtgctcgccgatagactgctggcgcggcaaatgaaggtagcggaacacacgccactgctgcggatcaccagcttgagttatagcgagagcggggagtttttgaattatagtgtgatgttcagaaatgccagcgaataccaggtggagtaccatttacggcgactccacccggaaaagagttaaccgatactccagaagagcaccgccagtaattggggggtgataatgcgcaggaacattaccaacggatagacagtggcgtaagagagcgccgccgcaccgctggttggatgaagattattagcaaacgccagcgccggaggatcggtcatggaacctgccagcatcccgcacatggtcaggtaattcattttggctaacatccgcgccagaatgccaacagtaatcagcggaacggcggtgatcagggcaccataaccaatccagcttagcccttcgccattgaccagggtattcacaaaatccccaccagatttcagaccaacgacgctgaggaacagcacgatccccagctcccgcagcgcgaggttggcgcttggcggcataaaccagtacagcttgccgatactgccgatacgcccgaggatcaacgccataatcagcggtccgcccgccagccccagtttcaacgcggccgggaatcctggcacaaagacgggaatagaacctaacaatacgcctagcccgatgccaataaacactggcagcatctgaacctgttgcagtttttgctgcgcattccccagcacattggcaacggcatcaattgcggacggacgccccaccagattgaggatatcgccgaactgcaggctgatatcgccactggcgaccagttcgaccccggcacggttcaggcggctgataacaacgtcatagcgttctttaaagtgcaggtcgcgaatacgttttccgagcacgttttcattggtgaccaccacacgctcgacgcgcaaatcagtgcctttcgtggacaggctagtatcgacctcctgaccaatcaccagttgcgcattatgtaaatccgctggctgacccaccagatgcagcaaatcgcccagttggataatggtatctgggctaggaacttttagggtttcttcgcgtttcagacggctgcagataattttgtcgccgttgagaatcggtacatctttaatggctaaatcatgcaggttagggttctcaacgcgaatattgatagtcttgatcagcgcgccgccattggtgcgactagactcgtgctgctgagcttctgtctcgacattgacgcggaaaataacccgcaacatccacatggtgaacaaaatcccgcaaatgccgaatggatacgccatcgcgtaactcatccccatctgatcgaccatttccattggtgtacccaggtcgcgcaaaatctgctgccctgcccccagcgctggcgtattggtaaccgcaccggagaaaatccccagcactaccggcagtggaatatcaaacagtttatgcaggatggcggtaaccagaccaccgatgatgacgatcagaacagcaaacaggttgaggcgtaatccggagacgcgcaaactggcaaagaagcccggccctacctgaatcccgatagtataaacgaacaggatcaggccaaattcctgaataacatgcagcatatcgctacttaatgtcatccccgcctgagaaacaaaatggccgacgatgatcccaccaaacagcacgccgccaatacctaatcctatgccgcgaaatttgacgttgccgataaacaaaccgacgactgccaccaaagccagaatactgaccgttaatgctatatcactcatcgtccatttctcttgagataacattttaattgctacggattatggctgaatcggtgaagcagatttgccttatagcgcacattatcacgggaaagaacgtgccgaaatatcttaaacagtcgaaatttaacgcattgttgagtaagtaagacaaaaaaagccccaccagaatggcggggcaaagagaatagctagttagctatttaacgcgggacgttcgctgatagcgatacgctgcgctgcgatgggttcaggctcattacgaattaaatcaatatgcagtaaaccgtttacgaaggttgcgccagagacttccatattttcagccagcgtaaagctcaggctaaatggctgattcataagcccttgatgcagccattttttctcttcttttggctgctccggcgtgccttttacgctcaggcgcgtaccttccagttgaatctctaaatcttcctgacggaaacctgccagcgcaagggtaatgcggtagtggttatcgtcgcttttctcaatgttgtacggcgggaagctctggctttcaccggcgttttgcagtgcgttggccagtttgtcaaaaccgatccattgacgcatcagtggggataaatcgaagttacgcatagtcatttctccttctaagaagcgagtaagtacctgcaaatccgaagattcgcatatgctccctgacggcgagcatggagatgtcaggccgcgccaggcggccttagggaattagttgatttcgatacggcgcggttttttcgcttccggaatcacgcgttcgagatcgatatacagcaaaccatttaccaggttagcaccacgaacatgaatgttctcagctaactggaatttgcgttcaaagttgcgttcagcgatgccctggtacagataggtgcgctctttttgttcgtcggcgtgagcacctttcaccaccagcagattatcctgggcggtaatttccagttcgctctcagcaaaaccagccacagcgatagcaatgcggtaatggttttcgtctaccagttcaacgttatacggagggtagccgccattactctggctctggttgttttctaagtggttaaacaaacggtcaaatccaatagcagaacggtaaagcggggataaatcaaagttacgcataatcaatagctcctgaaatcagcgagaatgtaagaccttccacaatggacaggtcaggtagccagaacacccatcaggcgcgtcctcatcggctacgatgtaaaaatgggtctggaaatgaacttttcaagccttatcagcggacttttttttgcagtttatggtctattgcatagactgagggggcagcacgaaacgttaaagtgcgatagccgccacagtgcgacgtaatgatgatgttattttcagcaagggatcgctataactcatcaggccaacacccacgatcaacagatgaatttattatgataagaaatgtgttgttagcgttcatgatatgcagcggaatgacattactcggaggatgctccagcgtgatgtcccataccggagggaaagaaggaacgtatcccggcacccgcgccagcgcaaccatgattggcgacgatgaaaccaactggggcactaagagcctggcgattctcgatatgccgtttaccgctgtgatggacacgcttttactgccgtgggatgtgttccgcaaagacagcagcgtgcgcagccgcgttgaaaaaagcgaagccaacgcgcaagccaccaatgcggttattccaccggccagaatgcctgataactgatttagcgatcagtttcggtgatccacagctggccgccttccatccacgccagccactgaccatccgggctgaagaccacggcgtccgcagaaggactattggcgtggtgttcggttaaatactcaacctcgccgctttgcgcatgggcacaagcaattcgattatccagcacaaagcccaaccattctccactcggatgccagttaaatgcagactgaatatccgttttgttatgggttaactggcgcggctcgccgccctgtgggctgataagccacagttgcacaatgccgttatcatctcgcattaaaaacgcgatttgtgtaccctgcggattacagcgcacccagtggcgcgggacgttgactaaccccggataagcccgatggtgggtaaaggttaaacgtcgctgcacgacgccacgcggtggcgcgggcagggttgtttccgttccgcttaacggcgcatcacctgccgctttccagccagcttcatcttgcggtaactcaacgataaacagctccggcactttctcgccctttgggctaagtgtgtcgccaataaatgccagcgcgtgatttcctacccatccttcttcataagcacgattgatttcatcactgccaggctgtggcgtgggcgtggttttgctcaccagcacgcaccagtggctaccgctgtattcacgcggatgctgcttttgtacgttgaccgggccaaacggcgcagcaacaccgacgtttcgcaaatccagcgccggatcgagttcatgcattacatggtcgttataggtaaagctcaccctttcaccgttcgggctaaagacatgcacatggctgccgccgcgcagcactcctggcgtatacggcgcggtaatatccatcgcatcaaggttactcatcttgccgccttcaacaatcactccgcgccgatgatggaagtcgtaatgccatgtttcatcaggattttccgggccgtggatgaaaacatatttctcactcttcggatgaacggtcaccacgccgacgtgtgcgccctgactcgcgcgatagataacctcgacctcgccggtatggatattcacacgctcaatggtctcgccggtaaagctcgcgccagaaggacgcacgtcaaataccagccactggctgtcgggcgtccaggtattggtattggtgagcaggtgattacggggagcaaaggttatctgtttcatggcgcggtcctgatacaaaacgggtcccgccatcatacttcacaaggacttcactttcagacaatagtcttttgccatcgtgatgaatgtgagtgaaaagatggaacatttcgacgtggcgattattggcctcggcccggcaggaagcgcgttggcacgaaagttagcaggcaaaatgcaggtgatcgcgctggataaaaagcaccagtgtggtactgaaggtttcagcaaaccctgcggcggtctgctggcaccggacgcgcagcgatcttttattcgcgatgggctgacgcttcctgtcgatgtgatcgctaatccgcagattttcagcgtcaaaaccgtcgacgtcgccgcaagcctcacgcgtaactaccagcgaagctatatcaatattaatcgccatgctttcgacttgtggatgaaaagcctgatccccgccagcgttgaggtttatcacgacagcctgtgccgaaaaatctggcgtgaggatgataaatggcatgtcatttttcgtgcagacggctgggagcaacatattaccgcccgctatctggtcggtgccgatggcgcaaacagcatggtgcggcgacatctctacccggatcatcaaatccgtaaatatgtcgctatccagcagtggttcgcggagaaacatccggtgccgttctactcctgcatctttgataatagcataactaactgttatagttggagtatcagcaaagacggttattttatctttggcggtgcctatccaatgaaagacggtcagacgcgtttcacgacgctgaaagagaaaatgagcgcctttcagttccagtttggtaagacggtgaaaagcgaaaaatgcacggtgctgtttcccagccgctggcaggattttgtctgcggtaaggacaacgcctttctgattggtgaagcggcgggatttatcagcgccagcagcctggaggggattagctatgcgctggatagcacagacattctgcgtagcgtgttactgaagcagccagagaagctcaataccgcttactggcgcgccacccgcaaactgcgtttaaaactcttcggcaagatagtaaaaagccgatgcctgaccgcaccggctttaagaaagtggattatgcgcagtggtgtggcacatattccacagttgaaggattaaccaacgcgcttcacatcgcccaccagcaggatataagagagcgcgccaatcaacgcgacggcggagatataaaccagtgcaggtgcgaaaccgtaaccctgcgccaggtaccccaccaccagcggaacggtgatgccgcccagaccaccggcgaagttaaacacgccgccggttaaaccaatcaggcgcatcggtgccagagaagaaaccaggctccaggtaatgctagcaaaaccgttaccgaagaatgccagcgccatcaggcacataatcatcatcggatcgttagtgtagttagcgcccataatgcaggtggagatcagcaagccgcagataatcggcgttttacgcgcaaagcccagactaaagcccttacgtaccagcagatccgctacccagccagagagcaggacgccgacaaacgccgcgaggaatggcaccgtggtcataaagcctgctttcagcgccgtgattcctttttcctgggttaaatagttcgggaaccaggttaagaaaaaccacagtgtagaagccaccgcaaattgcccaagataaacgccgatcagtttacgatggaacaccagtttccagtctttggctgttaacggctgacgcgcctctttcttcaccggcgcatcaccatccaccagaccgccgccatcacgaatgtaatccagttcagctttgctgatacctttggtcaggcgcggcggctgataaaccttaaaccaaatcaggctccagataatgccgataccaccagtgacaatgaacacccagtgccagctcaacatctcctgaatccagatcagcagcggcgtcagaaacgccagaccgacaaactgaccagacgtataaaaaccaacggcagaagcgcgttcatgttccgggaaccagctggtcaccatccggttattggtcgggaaagcaggcgcttcgaaaataccggttatcgcgcgcagaccaattaaactcattaagcccgtggcaaagccctggaataaagtcgccacactccagccaaatatcgcaataaaataagtcacgcgagaacctacgcgatctaaaaaccaaccgccggggatctgacatagcgtataaagccaggcgaaggcgctaaatacatagcccatttccgctttggtaatgccgaactcttcctgaatatgggcggaagccacggccaggttggcgcggtcgacataacaaatgactaccgtaataaagatcatcaccagcgtcagataacgccgacgccccggctttgctgcattaacgggaatatccatagcgagctttctccagattttgggcatagcgaagccgctcaccatgccctgtaatttacagagggttatatttttgtattgctgttttagtgcccgatgaggggcttacgtggcaggaattaccactctgctacgctgttatcttcatgacgccagagcggattacgccagtccggggcatttttactgaactcaatcactttagcttcgtcgatttccacgcctaagcccggtttcgttaacggtttaaagaagccgccgaccatgctgaagtcttctttgtttttcacaaagtcgagtaactccgcgcctttgttgtaatgaattcccatactttgttcctgaagtacggcgttataggaaacaaagtcgatatgcaggcaagccgccagtgcaatcggtccgagcggacagtgcggcgcaagggtcacgtcataggcttctgccattccggcgattttgtagcattcggtaataccgcccgcgtgggagagatccggttgcagaatgctaataccacctgcctccagcacgcgtttaaaatcgaagcgactgaacatgcgttcacccgccgccagtggaatatgcgtttgtgccgccagtttcgggtagtattcggcttgttccgccagcaccggctcctcaataaacagcgggcgatacggctccagttctttaatcagcactttcgccatcggcgcgctgacgcgaccgtggaaatcaagaccaaactcaatctgattgccaaaagcttcacgaatttgtgccacggtgttaaccgccgcatctaccgcgcgggagttatcaattagccccagttcttcacaaccgttcagtttgaaggtatcgaagccgatttcgcgtagcgttttaatgccgtcgataacatccgccggacgatcgccgccaacccaactgtaggctttaattttgtcgcgaaccaggccgcccatcagttgccagaccggcgcattcagcactttacctttgatatcccataacgcctggtcaatcccggcgatggcgctcatcaggatcggaccgccgcgatagaatccggcgcgatacatcacttgccataagtcattgatgcggcttggatcctgaccaatcaaatagtcacccagctcgtgaactgccgcttccaccgtacgggcgcggccttcgatcacgggctcgccccaaccgaccacgccttcatcggtttcaattttcaggaacatccagcggggaggtaaacgatacgtggtaattttggtgattttcattgcactgcctctcgatacgccttaacaaatgctgctgcctgctgcgcggtgcgctctacggattgcccggcgcgatagagatcgctgcctaagcccgcccctgcacaacctgcgtctatccactgcgccaggttttctggcgtcacgccgccaacggcaaagactgcgatgtcgcttggcaataccgcttttaacgctttgatgtattgcggaccaaaagcgctactcggaaatattttcagcgcctgcgcgcccgcttcgagcgcggtaaaggcttcggtcgccgtcgcgcagccggggcagacggtcatgccgtagcccaccgcacggcggatcacttcactatggatattgggcgtaacgatgagctgacagcccatcctggcgagcgcatcgacctgttcaggtttcagtaccgtacctgcgccaatcaacgccttgtcgccgtacgcatcaacgatggcgggaatgctttgctcccattgtggggaattcagcgggatttcaaccgcgtcgaacccggcgtcaatcaccgcgccaacatgcgccagcgcctcgtcgggcgtaataccgcgcaaaatggcgatcagcgggagtttagtttgccactgcatgagcgatgctccttataccagcctgaaatgccgtgtcgcccgccaccgccgtcacgtcgcaacccatcgcctgaaaggcttgctggtagcgcgcggtcaggcttgttccggcgacaagggtgatggcgtgttgatgggccacatagtcgcgcatactggcgacctctgcgccaatcaacaaaccagagagaaattcgctgacctgttcgcggggaagtgttcccagcacatggctggcgcgaacttcaaaaagctgcggcaatatggcgggcgtattaagaccacgctcaaggccagctgtgaaggcatcggcagagttttcctgcggcggcaaacctgcgccaatcaaactgtgatttaacagtaaatgatgtaattcaccggtcatcacggtgcgaaaatcgttgatttgctggctatcggcctgcacccatttgcaatgggttccgggcatgacataaagagaggaaggagccagagctcgcgcgccgatcaattgtgtttcttcgccgcgcatcacattgtggttatcgtcatgagagacacataatccgggaataatccagatattgtcgccaacactcgttaattgttcgccaatagagctaaaacaggcaggaacagataaatacggtgcaactttccagccgacgttgctgccaaccattcctgccattaccactggcgttttctcttcacgccagtcggtcgtgacttctgctaacaccgcagccggagattttccgttcaggcgcgtgacgcctgcttcactttgcctgctctccaggcagtggtcgccctgataaagccaggcgcgcagattggtgcttccccagtcaattgcgatgtagcgagctgtcatgtgatttcctttaaccttcgtgtgctgctggcgatcatggtaagcgccgcctgctctgccgcatcgccgtcctgatgtcgtatcgcatcgaacagcgccttatgttcctggagcgtttgcggcatgttggcctcatcgcccatccaggttcgttcaaaaaccgcccgctgcaggctactgatcgcaatgctaagttgctgtaacaccgggttatgcacgctctgcagcaccgcctcgtggtagcgaatatccgcttcgttaaacgcttcgcggtcctgattgttggcaatcatctcgttcagcgcgctttcaatctgcgccagatcgctggaagtcgcgcgctctgctgcccaacgggcaatcgccggttccaccagatttcgcacttcgctcatggcactgataagccgtgggtcgtagtcattttccagcacccattgcagtacgtcagtgtcgaggtaattccactggttacgcggtgccacaaacgccccgcgataacgtttcatttcaatcagccgcttcgccatcaggctacggaacacctcacggatgatgttgcggctggttgcaaactcctcacagagttccgcctcagccggaagcgggctgcctggcacgtatttgccgtgaacgatctgtttacccagcgtaatgacaatgcgatcggttttattgagagtcatggagagtccttgtgctctgtatgttcttctctactttaccccgatcgatgcataacgcggcaactttgtagtaccagcgtgatgacgttcgcgtttgccgtgcgtgtaatgtagtacaaacttatattgttgtactacaatttagatcacaaaaagaacaatgcataaaaaaatgacatgcgtcgggcagaaatctgaaaagggatatcaggcgctaaacaggagggaaagaagagtatgctttcaacggcttagctactcgtttaaaggattaatcatgaagttgaattttaagggattttttaaggctgccggtttattcccactggcgctgatgcttagtggctgtatcagctatgctctggtttcccataccgcaaagggtagtagtggaaagtatcaaagccagagtgacaccatcactgggctaagccaggcaaaagatagtaatggaacaaaaggctatgtttttgtaggggaaagcctggattaccttatcactgatggtgccgatgacatcgttaagatgctcaatgatccagcacttaaccggcacaatattcaggttgccgatgacgcaagatttgttttaaatgcggggaaaaagaaatttaccggcacaataagcctttactactactggaataacgaagaagaaaaggcactggcaacgcattatggttttgcctgtggtgttcaacactgtaccaggagtctggaaaacctaaaaggcacaatccatgagaaaaataaaaacatggattacagtaaggtgatggcgttctaccatccatttaaagtgcgattttatgaatactatagtcccagaggcattccggatggtgtttccgcagcattactgccagtgactgttacgctggacatcattactgcaccgctgcaatttctggttgtatatgcagtaaaccaataatcagtaagcgggcaaacgcgtttatgctgtttgcccgcccacagattaattcagcacatacttctcaatagcaaacgccacgccatcttcaaggttagatttggtgacaaagttcgccacttctttcacactaggaatagcgttatccatcgccacaccgacgcctgcatattcaatcattgcgatatcgttttcctgatcgccaatcgccatgatttcttccggtttaatacctaacacgtcggccagacttttcacccccgtacctttgttaacgcgtttatcgaggatttcgaggaagtacggcgcacttttcagcacggtatatttctctttcacttcctgcggaatacgcgcgatagcctggtcgaggatggcgggttcatcaatcatcatcactttcaggaactgggtattggggtccattttctccgcttcgcagaacaccagcggaatggtggcaacgaaggattcatgcaccgtgtagtagctgatatcacggttggcggtgtacagcgtggtgcggtccagggcgtggaaatgagaaccgacttcgcgagagagtttttccaggaaacgatagtcgtcatagctgagagcagtttgcgccacggtgctaccatcagcggccttctgtaccagcgcgccgttataagtaatgcagtagtcgcccggctgttccatatgcagctctttcaggtagttgtgcacacctgcatacgggcgacccgtcgttagcacgacattcacgccacgggcgcgagctgcggcaatcgcatttttaacggcgggactaatggtgtgatcgggcagcagaagggtgccatccatatcgatagcaatgagtttaatagccatgagttccccaggtagattggttcctgacccatgctaacgcgattccgctcaaaaatcagtacaacacccgagggaaaagggggatgcaacgcgcgttgcgtgctccctttttgcttagcggaagagtttccctttcagcagttccatgcctgcggaaagcagatcgttattggcttgtggactcacttcaccttgcggactgagcgcatcaataatcttcggcaattgttctgccagtaaactggaagctgtactggtatccacgccaagtttttgcccgagatcggacaccgcatttgtgccgagcgcgctttccagttgctcgccactaacgctttgattgccctgttgattactcagccaggtactgagaatggcccctaagccgccactttgcagtttttccagcagcacctgaatgccgccctgctcctcaacccaacttaaaatagcctgatatttccccgcatcgcctttcagaaaggcaccgacaacttcatcaaaaagccccatgataatcacctgtaaagcgttacgtgttgacccaaaaagtatagatttgcgggatgataattgcggattgcagaaataaaaagggcggagatgatctccgcccttttcttatagcttcttgccggatgcggcgtgaacgccttatccggcctacaaaatcatgaaaattcaatacattgcaagattttcgtaggcctgataagcgtagcgcatcaggcacgctcgcatggttagcgccattaaatatcgatattcgccgctttcagggcgttctcttcaataaacgcacggcgcggttcaacggcgtcgcccatcagcgtggtgaacaactggtcggcagcaatcgcatctttaacggtaacgcgcagcatacgacgactttccgggtccatagtggtttcccacagctgttccgggttcatctcgcccagacctttataacgctggatggagaggccgcgacgggactctttcaccagccagtccagcgcctgctcgaagctggctaccggctgacgacgctcgccacgttcgataaacgcatcttcttccagcaagccacgcagtttctcacccagcgtgcagatacgacgatattcgccaccggtgataaactcgtgatccagcggatagtcagtatccacaccgtgggtacgcacgcgaacaatcggctcgaacaggttttgctcagcattggtgtgaacatcaaacttccactggctgccgtgctgttctttgtcgttcagttcgctgaccagcgcgttcacccagcgggtaacggtctgctcatcagaaaggtcagcttccgtcaacgtcggctgatagataagctctttcagcattgctttcggataacgacgctccatacgattgatcattttctgcgtcgcgttgtactcagataccagtttctctaacgcttcgccagccaatgccggtgcactggcgttggtgtgcagcgttgcgccgtccagcgcgatagagatctggtactgatccatcgcttcgtcgtctttaatgtactgttcctgcttgcctttcttcactttgtacagcggcggctgagcgatgtagacgtgaccgcgttcaacgatttccggcatctgacgatagaagaaggtcaacagcagcgtacgaatgtggctgccgtcgacgtccgcatcggtcatgatgatgatgctgtgataacgcagtttgtccgggttgtactcgtcacgaccgataccacagccaagcgcggtgataagcgtcgccacttcctgagaagagagcatcttatcgaagcgcgctttctcgacgttgaggattttacccttcagcggcagaatcgcctggttcttgcggttacgcccctgcttcgcagagccgcccgcggagtccccttccaccaggtacagttcggaaagcgccggatcgcgttcctggcagtctgccagtttgcccggcaggcccgctaagtcgagcgcacctttacggcgggtcatttcacgcgcgcgacgcgccgcttcacgggcacgggcagcatcgataattttgccaaccacgattttcgcgtcggttgggttttccagcaggtattctgccagcagttcgttcatctgctgttcaaccgcgcttttcacctcagaagaaaccagtttgtctttggtctgggaggagaatttcgggtccggcactttcacggaaacgaccgcaatcaggccttcacgcgcatcgtcaccggtggcgctgactttggcttttttgctgtagccttctttgtccatgtaggcgttcagggtacgggtcatcgccgcacggaagcctgccaggtgagtaccgccgtcacgctgcggaatgttgttggtaaagcagtagatgttttcctggaagccatcgttccactgcaacgccacttcgacgccaataccgtctttttcagtggagaagtagaagatattcgggtggatcggcgttttgttcttgttcagatattcaacgaacgccttgatgccgccttcatagtggaagtggtcttctttgccgtcgcgcttgtcgcgcagacgaatggaaacgccggagttgaggaagctcaactcacgcagacgtttcgccagaatttcatattcgaactcggtcacattggtgaaggtttcgaggctgggccagaaacgcaccatggtgccggttttttcagtctcgccggtaaccgccagcggggcctgcggtacaccgtgttcgtagatctgacggtgaattttaccctcgcgctggataaccagctccagtttttggctcagggcgtttactacgctaacaccaacgccgtgcagaccgccggacactttataggagttatcgtcaaatttaccgcctgcgtgcagaacggtcatgatcacttccgccgcgcttacgccctcttccgggtgaataccggtcggaatgccgcgcccgtcatcctgtacagagacagagttatcggcgtgaatggtgacgataatttctttacagtgacccgcgagcgcttcgtcgatagcgttatctaccacctcgaataccatgtggtgcagaccggtgccgtcatccgtgtcgccgatatacatacccgggcgcttacgcaccgcatccagccctttcaggactttgatactggaggagtcataagaattgctcatcaacgtttctcgctcatttatacttgggttaatccgttattttacccttttccacggtaaacatcttgctattttcgtcgctcatgtctataacgtgttcagcactgatcgcgctgacaaagacctgactttgcgtcgcttttaagcggctggcaagcagcccgcgacgctcatcatcaagctcagaggcaaaatcatctatcaggtagagacaccgccgcccgctttcacgggtgaggaactctccttgcgccagacgtaaggcgcacatcaacagcttaagctgcccacggcttaaggtatcttccaccggcgcaccgtcggcgcgaatgcgtaagtccgctttgtgcgggccgtgcgcggtgtaggttagctggcgatcgcgttcaaaattacgttccagcacctcagcatattctgtctctttctcccagccgcgctggaaagagaaagtcagagaaaactcagggagaaattgcttacaggtatcagccatatcggccgcgataccggcgctatactccgcgcgccaggtgctgatttgctccgccagcgggatcagctctttatcccacgggcgtagctgttcgtaacgtgtcacctggcgcagcgccgcattgcgctgcttgagcaatcgcttgagattgctccaggcggtgaaaaatccgggttcgttgtgaaagcatccccagtcgaggaatgctcttctgtatttggggccgccgttgagtaaagtaaacccttctggcgttatcaactgcattggcatcaggtgcgccagttccgcgaccttatgcccgtctgtaccgtcgatgcggactttgctgtcgccctgtttgtctttggttaagccaatcgctgtctcgcgctcttcgccctgtaatcgcccgtggagaacaaacgcctcctgctcatggcgaatgacgcgaccaatctgcaaactgcgaaacgcccgaccatggccgagcgtatagatggcttccagcacgctggttttgccactgccgttggcgcctaccagaaagttaaagccgggagataaggcgagatccgcggtttcaatgttgcggaaatcgcggatcaacaagcgggtgagggacattacagtctcattggcatgacaacataagccgcgctctggctggccgcatcttcaatctgcacgctggaaacgctatcggtcagcatcatgcggacgttttcgcatttcagcgcgttcagaacatccagcacataactgacgttgaagccgatttccatctccgcaccgctataggtaacgtcgaggatctcttccgcttcttcctgttccgggttgttggcggtgattttcagctggttttcgctgacataaagacgtacgccgcggaatttctcgttagagagaatcgccgcgcgagcaaacgcctgcttgagcagatcgcagccagcttccagatgtttgtccgggttcttcggcagaacgcggcgataatccgggaagcgaccatccaccagtttggaggtgaagataaagtcgccaacgtgggcgcgaatgttgttgctgccaatctgtacgcgcagcggattgtcgccgccgtcgagcatacgcatcagttcaatcacgcctttacgcggtacgatcacgctatggcttggcaaagattgaccaattggcatactacagaccgccagacggtggccgtcggttgccacggtgcgcagttcttcaccttcggtttcaaacagcataccatttaagtaatagcgaacgtcctgatgcgccatagaaaactgggtcgcttcaatcagacgcttcatcgttgcctgcggcagggtaaattcgacttcactctgccagtcatcgaggttcgggaaatccgccgctggcagggtagacaggctaaaacggctacgcccggagcgtaccagcatccgttcaccttccagctgcacggcaatttccgcgccttcaggcagaccacggcagatatcaaagaatttgcgcgccggaacggtcgtcgctcctggctcgtgtggctgaaccagcgcaacacgtgccaccatttccatctcgagatcagtaccggtcaggctcaacgtaccgtcagcaacctgtaacagcagattaccgagaatcggtagcgtaggacgaccacctaacggaccgctcacctgttgtagcggttttaataaatgctcacgttctacggtaaatttcataggtttagctactcaatgttctgattaaattactaaaatcttctttgatatcgtggctctcttcacgcaactgctcgatcttacggcaggcatgaagcaccgtcgtgtggtcacggccaccaaacgcatcgccaatctccggcagactgtggttagtcagctctttcgccagcgccatcgccatctggcgcggacgcgccacgctgcgggatcgacgcttggaaaggagatccgcgactttgatcttgtagtactccgccaccgtcttctgaatattgtcgatggtgaccagtttttcctgcaatgccagcaagtcgcgcagcgcctcacgcacgaagtcgatggtgatcgcccgtccggtaaagttggcattggcaatgacgcggttcagcgccccttccagctcacgtacgttagatcgtagacgcttggcgataaagaacgccacttcgcccggcaaacgaatgtcgttttcgtcggcctttttcatcaggatcgccacacgggtttccagctctggcggttcgatcgccacagtcagtccccaaccgaagcgggatttcaaacgatcctcaacgccgttgatctctttcggatagcgatcgctggtgagaatgatctgttgattaccttccagcagggcgttgaaggtgtggaaaaactcttcctgagatcgttctttattagcaaaaaactgaatatcgtcgatcagcagtgcatctacggaacggtagtagcgtttaaactcttcgatcgcgttgttttgcagggctttaaccatgtcctgaacaaagcgctcggagtgcatataaaccactttggcattcggcttgcgcgccataatgccgttacccaccgcatgcagcaggtgagttttacccagacccgtgccgccataaaggaacaacgggttataggcaccgccagggttatccgccacctggcgagccgccgcgcgcgccagttggttagatttaccttcaacgaagttatcaaacgtgtgtttgacgtttacgttagaacgataggtcggttctgccggggccgggacgttatcccaaccactgcgcgtagaaggcgcagcacgttgcggctgcgtttgcgccacctgtgcaggggccgcgacgttgctcgtcactgccgcttgtggcgtttgcgtcaccggtttggtgccgacttcaaaacgcagctgtggggcatccgctccgcagaaactggttagcagtccattgatattattaaggtacttgtcccgtacccaatcgaggacaaaacggtttggcgcgtacagggccagcgtgttatcgctcagttccgcctgcaatgggcgtatccacatactgaattctgtggctggtaactcatcctgcaatcgggcaagacactgctgccaaaggctaagactcacggcggactccactcgaacaaaagtcgataatgactaaggctgaaacattcatgattgttgacgtacgtcgaaaagaccctgcttgagggtgacgcacgaaccgctgtctgcggttatatgcccgatcaagatcctgcaaaacgatcgggaccgcggatcatagcctaaactgcgcaagagatcttctgtttctcacagattttcccgatttatccacaggactttccagaactcgctaagtgtaaacgatcctgccgcgaggcgggcacgatttacgccgcatattggaaaatttaatgaccatagacaaaaattggcttaatcgatctaataaagatccaggacgatccttgcgctttacccatcagcccgtataatcctccacccggcgcgccatgctggtttccactggtgtgaggtcgtacattttccctgcgaaaaggtgcggaaaagcgcggtaaataaggaaagagaattgactccggagtgtacaattattacaatccggcctctttaatcacccatggcttcggtgtccatcgtttcatttttcggcggatatccaataaagccattgaatttattcaagtttaggtagaaatcgccatgaaacgcacttttcaaccgtctgtactgaagcgcaaccgttctcacggcttccgtgctcgtatggctactaaaaatggtcgtcaggttctggcacgtcgtcgtgctaaaggccgcgctcgtctgaccgtttctaagtaataaagctaacccctgagtggttaagctcgcatttcccagggagttacgcttgttaactcccagtcaattcacattcgtcttccagcagccacaacgggctggcacgccgcaaattaccattctcggccgcctgaatagcctggggcatccccgtatcggtcttacagtcgccaagaaaaacgttcgacgcgcccatgaacgcaatcggattaaacgtctgacgcgtgaaagcttccgtctgcgccaacatgaactcccggctatggatttcgtggtggtggcgaaaaaaggggttgccgacctcgataaccgtgctctcagcgaagcgttggaaaaattatggcgccgccactgtcgcctggctcgcgggtcctgacttaatcggaagcgttggaaaaattatggcgccgccactgagccctggcagccgggtcctgatagccctcattcgggtctatcaacgcctgattagtccgctactcgggccgcattgtcgtttcactccaacctgtagtagctacggaattgaggcattgcgcaggtttggagtgataaaaggcagttggttgacggtgaaacgcgtattaaaatgccaccctttacaccctggtggtgacgatcccgtcccgcccggaccatttgataccagagaacactaacgatggatagccaacgcaatcttttagtcatcgctttgctgttcgtgtctttcatgatctggcaagcctgggagcaggataaaaacccgcaacctcaggcccaacagaccacgcagacaacgaccaccgcagcgggtagcgccgccgaccagggcgtaccggccagtggccaggggaaactgatcagcgttaagaccgacgtgcttgatctgaccatcaacacccgtggtggtgatgttgagcaagctctgctgcctgcttacccgaaagagctgaactctacccagccgttccagctgttggaaactagtccgcagtttatttatcaggcacagagcggtctgaccggtcgtgatggcccggataacccggctaacggcccgcgtccgctgtataacgttgaaaaagacgcttatgtgctggctgaaggtcaaaacgaactgcaggtgccgatgacgtataccgacgcggcaggcaacacgtttaccaaaacgtttgtcctgaaacgtggtgattacgctgtcaacgtcaactacaacgtgcagaacgctggcgagaaaccgctggaaatctccagctttggtcagttgaagcaatccatcactctgccaccgcatctcgataccggaagcagcaacttcgcactgcacaccttccgtggcgcggcgtactccacgcctgacgagaagtatgagaaatacaagttcgataccattgccgataacgaaaacctgaacatctctagcaaaggtggttgggtggcgatgctgcaacagtatttcgcgacggcgtggatcccgcataacgacggtaccaacaacttctataccgctaatctgggtaacggcatcgccgctatcggctataaatctcagccggtactggttcagcctggtcagactggcgcgatgaacagcaccctgtgggttggcccggaaatccaggacaaaatggcagctgttgctccgcacctggatctgaccgttgattacggttggttgtggttcatctctcagccgctgttcaaactgctgaaatggatccatagctttgtgggtaactggggcttctccattatcatcatcacctttatcgttcgtggcatcatgtacccgctgaccaaagcgcagtacacctccatggcgaagatgcgtatgttgcagccgaagattcaggcaatgcgtgagcgtctgggcgatgacaaacagcgtatcagccaggaaatgatggcgctgtacaaagctgagaaggttaacccgctgggcggctgcttcccgctgctgatccagatgccaatcttcctggcgttgtactacatgctgatgggttccgttgaactgcgtcaggcaccgtttgcactgtggatccacgacctgagcgcacaggacccgtactacatcctgccgatcctgatgggcgtaacgatgttcttcattcagaagatgagcccgaccacagtgaccgacccgatgcagcagaagatcatgacctttatgccggtcatcttcaccgtgttcttcctgtggttcccgagtggtctggtgctgtactatatcgtcagcaacctggtaaccattattcagcagcagctgatttaccgtggtctggaaaaacgtggcctgcatagccgcgagaagaaaaaatcctgattcggtgagttttcgctaaaataagggcggtcagttgaccgccttttttcttttcgtagggcggataagcaccgcgcatccgccacacaaagcaacaggaacatcatgagcgataatgacactatcgtagcccaggccacgcctccgggacgtggcggcgttggcatcctgcgcatctccggcttcaaagcccgtgaagttgccgaaaccgtgctgggtaaactgcctaagccgcgctacgccgattatcttccgtttaaagacgccgacggcagcgtgctcgatcaggggattgcgctatggttccctggcccgaacagcttcaccggcgaagatgtgctggaactgcaaggtcatggcggtccggtgatcctcgacctgctgttaaaacgcattctgaccattcccggcctgcggattgctcgccctggtgagttttccgaacgcgcgtttcttaacgataaacttgacttagcccaggccgaggcgattgccgatcttatcgacgccagtagcgaacaggcggcccgtagcgcacttaacagcctgcaaggcgcattctccgcacgggttaatcatctggtagaagccctcacccacttgcgcatttacgtcgaagcggcaattgatttccccgatgaagagatcgatttcctctccgacggaaaaattgaagcccagctcaatgacgttattgccgatcttgatgcagtgcgtgctgaagcacgtcagggtagtttgttgcgcgaagggatgaaagtggtgattgccggacgtcctaacgccggtaaaagcagcctgttaaacgcgctggcggggcgtgaagcggcaatcgtaaccgatatcgccggaactacgcgtgacgtgctgcgtgagcatatccacattgacggaatgccgctgcatatcatcgataccgccgggctacgtgaagccagtgacgaagtagaacgtattggtatcgagcgcgcgtggcaggaaattgaacaggccgaccgcgtgctgtttatggtcgatggcaccacaacagacgccgtggatccggcagagatctggccggaatttattgcccgtctgccagcgaaactgccgatcaccgtggtgcgcaataaagccgatatcaccggcgaaacgctgggaatgagtgaagtgaacggtcacgcgttaattcgtctcagcgcaaggactggtgaaggcgtggacgtgctgcgtaaccatctcaaacagagcatgggctttgacaccaacatggaaggcggcttcctggcgcgtcgtcgccacctacaggcgctggaacaggcagcggaacatctacaacagggcaaagcgcaactgttgggagcctgggcaggtgaactgctggcggaagagttgcgtctggcacagcagaacttaagcgaaatcaccggggaatttactagtgacgacctgctggggcggattttctccagcttctgtattggtaagtaaccgcgcttacgaggccgcattctgactgtcagatgcggcttcgcttcattgttaccactcctgttattcctcaaccctttttttaaacattaaaattcttacgtaatttataatctttaaaaaaagcatttaatattgctccccgaacgattgtgattcgattcacatttaaacaatttcagaatagacaaaaactctgagtgtaataatgtagcctcgtgtcttgcgaggataagtgcattatgaatatcttacatatatgtgtgaccagtaaatggttcaatattgacaacaaaattgtcgatcaccgcccttgatttgcccttctgtagccatcaccagagccaaaccgattagattcaatgtgatctatttgtttgctatatcttaattttgccttttgcaaaggtcatctctcgtttatttacttgttttagtaaatgatggtgcttgcatatatatctggcgaattaatcggtatagcagatgtaatattcacagggatcactgtaattaaaataaatgaaggattatgtaatggaaaactttaaacatctccctgaaccgttccgcattcgtgttattgagccagtaaaacgtaccactcgcgcttatcgtgaagaggcaattattaaatccggtatgaacccgttcctgctggatagcgaagatgtttttatcgatttactgaccgacagcggcaccggggcggtgacgcagagcatgcaggctgcgatgatgcgcggcgacgaagcctacagcggcagtcgtagctactatgcgttagccgagagtgtgaaaaatatctttggttatcaatacaccattccgactcaccagggccgtggcgcagagcaaatctatattccggtactgattaaaaaacgcgagcaggaaaaaggcctggatcgcagcaaaatggtggcgttctctaactatttctttgataccacgcagggccatagccagatcaacggctgtaccgtgcgtaacgtctatatcaaagaagccttcgatacgggcgtgcgttacgactttaaaggcaactttgaccttgagggattagaacgcggtattgaagaagttggtccgaataacgtgccgtatatcgttgcaaccatcaccagtaactctgcaggtggtcagccggttagtctggcaaacttaaaagcgatgtacagcatcgcgaagaaatacgatattccggtggtaatggactccgcgcgctttgctgaaaacgcctatttcatcaagcagcgtgaagcagaatacaaagactggaccatcgagcagatcacccgcgaaacctacaaatatgccgatatgctggcgatgtccgccaagaaagatgcgatggtgccgatgggcggcctgctgtgcatgaaagacgacagcttctttgatgtgtacaccgagtgcagaaccctttgcgtggtgcaggaaggcttcccgacatatggcggcctggaaggcggcgcgatggagcgtctggcggtaggtctgtatgacggcatgaatctcgactggctggcttatcgtatcgcgcaggtacagtatctggtcgatggtctggaagagattggcgttgtctgccagcaggcgggcggtcacgcggcattcgttgatgccggtaaactgttgccgcatatcccggcagaccagttcccggcacaggcgctggcctgcgagctgtataaagtcgccggtatccgtgcggtagaaattggctctttcctgttaggccgcgatccgaaaaccggtaaacaactgccatgcccggctgaactgctgcgtttaaccattccgcgcgcaacatatactcaaacacatatggacttcattattgaagcctttaaacatgtgaaagagaacgcggcgaatattaaaggattaacctttacgtacgaaccgaaagtattgcgtcacttcaccgcaaaacttaaagaagtttaattaatactacagagtggctataaggatgttagccactctcttaccctacatcctcaataacaaaaatagccttcctctaaaggtggcatcatgactgatcaagctgaaaaaaagcactctgcattttggggtgttatggttatagcaggtacagtaattggtggaggtatgtttgctttacctgttgatcttgccggtgcctggtttttctggggtgcctttatccttatcattgcctggtttagtatgcttcattccgggttattgttattagaagcaaatttaaattatcccgtcggctccagttttaacaccatcaccaaagatttaatcggtaacacctggaacattatcagcggtattaccgttgccttcgttctctatatcctcacttatgcctatatctctgctaatggtgcgatcattagtgaaacgataagtatgaatttgggttatcacgctaatccacgtattgtcgggatctgcacagccattttcgttgccagcgtattgtggttaagtagcttagccgccagtcgtattaccagtttgttcctcgggctgaagattatctcctttgtgatcgtgtttggttcttttttcttccaggtcgattactccattctgcgcgacgccaccagctccactgcgggaacgtcttacttcccgtatatctttatggctttgccggtgtgtctggcgagttttggtttccacggcaatattcccagcctgattatttgctatggaaaacgcaaagataagttaatcaaaagcgtggtatttggtagcctgctggcgctggtgatttatctcttctggctctattgcaccatggggaatattccgcgagaaagctttaaggcgattatctccagtggcggcaacgttgatagcctggtgaaaagcttcctcggcaccaaacagcacggcattatcgagttttgcctgctggtgttctctaacttagctgttgccagtagcttctttggtgtcacgctggggttgttcgattatctggcggacctgtttaagattgataactcccacggcgggcgtttcaaaaccgtgctgttaaccttcctgccacctgcgttgttgtatctgatcttcccgaacggctttatttacgggatcggcggtgccgggctgtgcgccaccatctgggcggtcattattcccgcagtgcttgcaatcaaagctcgcaagaagtttcccaatcagatgttcacggtctggggcggcaatcttattccggcgattgtcattctctttggtataaccgtgattttgtgctggttcggcaacgtctttaacgtgttacctaaatttggctaaatccttcaagaagccagccattcgctggcttcttgcctctcaggaaatcacttatgtccaaatggcaactcgcctgatcctccttcaccacgtatgctttgcgtcaccttactatcaggacgctttagcccatgtcccgctttttgatttgtagttttgccctggttttactttatcccgccgggattgatatgtacctcgttggtttaccgcgcatcgccgccgatctcaatgccagcgaagcgcagttgcatattgcgttctccgtatatctggcggggatggcagctgcgatgttatttgccggtaaagtggccgatcgtagtgggagaaagccggtcgccatacccggcgcggcgctatttattattgccagcgtgttctgtagtctggctgaaaccagcacgttatttcttgcaggccgatttctacaggggttgggcgcaggctgttgttacgtagtggcgttcgctattttgcgcgacacgctggatgatcgacgtcgggctaaagtgctgagtttactcaacggtattacctgcatcattccggtgttagcgccagtgctcggacatctgattatgcttaaattcccgtggcagagtctgttctgggcgatggcaatgatgggcatcgcggtactgatgttgtctttgtttattttaaaagaaacgcgcccagcggcccccgcagctagcgataaaccacgagaaaatagcgagagcctgcttaaccgttttttcctcagccgtgttgttatcaccaccctcagcgttagcgtgatcctcactttcgtcaacacgagtccggtattgctgatggaaatcatggggtttgagcgcggtgaatacgccaccattatggcgctgaccgctggcgtcagcatgaccgttagtttctccacgccatttgcgctgggaatttttaagccacgtacgttgatgatcaccagccaggtgttattcctggcggcggggatcactcttgccgttagtccttcccatgcggtttctctgtttggtatcacgctgatttgcgccggtttcagcgtaggttttggtgtggcgatgagtcaggcgttagggccgtttagtttacgcgcgggcgtagccagcagcaccttaggtattgcgcaggtttgcggtagcagtctgtggatttggctggcagcggtggttggtatcggcgcatggaatatgctgatcgggattctgattgcctgtagcatagtgagcctgttgctgattatgttcgtcgcgcctggacgccccgttgccgctcatgaagaaatccatcaccacgcttgatctcaatctgctgctttgtctgcaactgctgatgcaggagcgcagcgtaaccaaagcggcgaagcggataaacgtgacacctagcgcggtgagtaagagcctggcaaagttaagagcgtggtttgacgacccgctctttgtgaacagtccgctgggtctgagccccacaccgctgatggtcagcatggagcaaaatctggcggagtggatgcaaatgagcaacctgctgctggataaaccgcaccaccagacaccgcgcggcctgaagtttgagctggcggcggaaagtccgctgatgatgatcatgcttaatgcgctgagcaaacagatctaccaacgttacccgcaggcgaccatcaaattacgtaactgggattacgattccttagatgccattactcgtggtgaagtggatatcggtttttccggtcgcgaaagccatcctcgcagccgggagctgttaagcagcctaccgttagccattgattatgaagtgctgtttagtgatgtgccctgcgtctggttacgcaaagatcatccggcactgcatcaaacgtggaatctggacaccttcttacgttatccgcatatcagcatttgctgggaacagagcgatacctgggcgctggacaatgtgttacaggagctgggacgcgaacgcacgattgctatgagcctgccggaattcgagcagagtctgtttatggcagcgcaacccgacaatctgctactggcgaccgcgccgcgctactgtcagtactacaatcaactccatcaactgccgttggttgctcttcctctcccgtttgacgaaagccagcaaaaaaagctggaagttccttttaccctgctgtggcataaacggaacagccataatccgaagatcgtctggttacgggaaaccattaaaaacctttacgcgagcatggcataaccgaatcgtatgaaacgcgacccaatttcacaataaaatgtaaaaaagttgtaataagcttgtctgaatcgaacttttagccgctttagtctgtccatcattccagtaaatgattactcttgtattcataatggaccattaagcatggagcgaaaaatggcgactcactttgcccgagggattttaacggaaggacatctgatttctgttcgtctcccctcccagtgtcatcaagaagcccgaaacattccccctcatcgtcaaagccgttttctggcgtccagaggtttactcgcagaactgatgttcatgctgtatggcattggcgaattgccggaaatcgtcaccctgccgaaaggtaaaccggttttcagtgataaaaatttgcctagcttttccatttcctatgccgggaatatggttggcgtggcgttaacaaccgaaggtgaatgtggcctcgatatggaactacagcgtgcgacgcgcgggtttcatagcccacacgcgcccgataaccacaccttttccagcaatgaaagcctatggatcagtaaacaaaacgatcctaacgaagcgcgggcgcagctcatcacgctgcgccgaagcgtgctaaaactaaccggtgatgttttgaatgacgatccgcgcgatctgcagctgctgcccattgccggacgcctgaaatgtgctcatgtaaatcatgtagaagcgttatgcgacgcggaagacgtgctggtgtggtccgtggcggtcacgcccacgattgaaaagctcagtgtctgggagttagatggcaaacacggctggaaaagcctgccggatattcacagccgcgccaacaatcctaccagccggatgatgcgttttgcccaactctctaccgtgaaggcttttagcccaaattgatagacaaccacaggagtcatcatgtctgaaaaattgcaggtggttacgttactggggagcctgcgcaaaggcagttttaatggcatggttgcacgtaccctgccgaaaattgctccggcgagcatggaagtcaatgcgttaccatccattgccgacattcccttgtatgacgctgacgtacagcaggaagaaggttttccagcaacggttgaagctctggcggaacagatccgtcaggctgacggtgtggtgatcgtcacgccggaatataactacagcgtaccgggtgggctgaaaaatgccatcgactggctttcccgcctgccggatcaaccgctggccggtaaaccggtattgattcagaccagcagtatgggcgtgattggcggcgcgcgctgtcagtatcacctgcgccagattctggttttcctcgatgcaatggtgatgaacaagccggaatttatgggcggcgtgattcagaacaaagttgatccgcaaaccggagaagtgattgatcagggtacgctggaccacctgaccgggcaattgaccgcatttggtgagtttattcagcgagttaagatctaaataaaaaacccgccagcaatcatgcatggcgggtttttaacgcgctatcgattttagtgagcgtcgataaagacaatcttcaggataaacagcagcgcaacgatgattacgcacgggcttagatcacgcagacgtccggtaccgattttcatcacgcagtaggagataaagcccagcgcgataccttcggtaatgctgaagctgaacggcatcatcacggcggtaataaacgccggaacagattcagtaagatcctgccagttcacgcgtgccagactggaagtcatcagcacgccaacgtaaatcagcgcaccagctgcagcgtagcctggcaccatccccgccagcgggctcagaaagataaccagcaggaacagcagaccaacaaccactgccgtcagaccggtacgaccgccaacgcttacgccggaagaggactcaatataagccgtaacggaagaagtaccgataaagctaccggtcacggaagagatactgtcgacatacagcgcctgcttcatgcgcgggaatttccccttctcatccgccagacctgctttatcggtcacgccaatcagcgtaccggaggagtcaaacaagttgaccaacatgaaagagaaaatcacccctgccagcccgaggttaaagctcccggctaaatctacatgacccacaactgtcattacgctcggcggcgcagaaacgatgccattgtagtgcacatcacccagcatccagcccagcagcgtcgtcaccacgatagaaaccagcaccgctgcgtgaatgttgcggctggccagaatagcaatgatgaagaagccgaggatacccagaagtacgctgtgagaagtcagattaccgatgctcaccagcgtttccgggttagcgacaatcacacctgcgtttttcagccccatcatgccaatgaacagaccgataccgctggtaatacccacacgcagactcaccggaatgttggctatcatccagtagcgaacgcggaaaatcgtcagtaacagcagacctatcgcgccccagaagattgcgcccatcccgacctgccacggcaagcccatcgcctgtacaacgacaaaagcgaagaacgcattcaggcccatagcgggtgccagtgcaactggcaggttagcaaacagtcccatcataatactgccgaatgcagcgatcagacaggtagtgacgaagacggcgctggtatccatgccagcaacgccaagaatttgcgggttaacaaaaacgatgtaaaccatcgtcaggaaggtggtaaaaccggcgatcacttcggtccgtgccgtcgtgccatgttcgcgcagtttaaacacgcgttccagcatcccctgaccagaagtctgggtggtatgttgatgactcattatctatttccgaacaaggagggaaaatccgtcgctatcgtataccaaaatgcgacaataggcgcgtttgtgagagacttttttattggatttacttatacggcaacgattgcgttgcgcaaatcggctctacgaaaacgttaaactgattaaaaaggaaaggcatgtcccggatagaagcggtatttttcgactgcgacggtacgctggtcgacagtgaagtcatttgctctcgcgcatatgtaacgatgtttcaggaatttggtattacgctcgatcctgaagaggtattcaaacgtttcaaaggtgtaaaactgtacgaaattatcgatattgtttcccttgaacatggtgttacgttagcgaaaacagaagctgaacacgtttaccgtgcagaagtcgctcggctgttcgatagtgaactggaagccatcgaaggggctggagcgctcctgagtgcgatcactgcgccaatgtgtgtggtatctaacggcccaaataacaaaatgcagcattctatgggcaagctgaatatgttgcactacttcccggataaactgttcagcggctacgatattcagcgctggaagccagacccggcgttaatgttccatgcggcaaaagcgatgaatgtaaatgtagaaaactgcattctggttgatgacagtgttgccggtgcacaatctggtatcgacgcaggtatggaagtgttctacttctgcgccgacccgcacaataagccgatcgttcacccgaaagtcaccacctttacccatcttagccagttacctgaactgtggaaagcgcgtggttgggatattacggcataattcttcacactcccttcacttaccccgcttaaattggcgctcaaaggtaagtaaagggagtttgatatgtctgttagtcgtcgggtaatacatcacggactttattttgcagttttaggaccgttaattggtgttctgtttcttgtcctctacatattcttcgcaaaagaaccgctggttctttgggtgataatacatccaatttttctcttattgagcataactacgggagctattcctgcgttgttaaccggtgtaatggttgcctgtctgccggaaaagatcgggagtcagaaacgttatcgttgtctggctggtggcataggtggcgtcgttatcaccgagatctattgtgcagttattgtacatattaagggcatggcttccagcgagttgtttgaaaacattctttctggtgacagtctcgttgtccgcatcattcctgcattgctggcaggtgtggtgatgagcagaatcattacccgtctacccggattggatattagttgtcctgaaacagactctttaagttaagcgggatactttatctttgggctactcaaaagcagacaggatgtttctatgactcaaaatatcaggccgttaccccaattcaaatatcatcccaagccactggaaacaggcgcatttgaacaggataaaaccgtagagtgcgattgctgtgaacaacagacgagtgtttattacagcggtcccttttattgcgttgatgaagttgaacatctctgtccgtggtgtattgcggacggttctgctgctgaaaagtttgcaggtagttttcaggatgatgccagcatagaaggtgttgaatttgagtatgatgaagaggacgaatttgccggtattaagaacacatatcctgatgaaatgctgaaagagttggttgaacgcacgccaggttatcatggatggcagcaggaattctggctcgcgcattgtggcgatttctgtgtttttatcggctatgtgggctggaatgatataaaagatcgcctcgatgaatttgccaaccttgaagaagattgtgagaatttcggtattagaaattctgatctagctaaatgcctgcaaaagggtggtcattgtcagggttatctcttccgctgtctccactgcggcaagctgagactgtggggtgattttagctaattatttaaataatgagaacaggccggagcgtaattcacacatccggccttatttcttaagcttaaccgagtgctaattctgcggcagcggctttatcagcgattaccatcaggctaggatgcagctgcaacacggaagctggaacatcttcggtaaccggaccttgcagaacatttttcagtgcctgcgctttacccgcgccgctgacaattatcagcaagtttttcgccgccatgatgcttttcggccccatcgtcacgtagctgtcaggcactaagctaaagtcgccgcccaactcgccatgcgccacaatatcaaccatctctccctggatcgggaactccacggtttgctcatggaaatgggtcgtattcggcaaattgccacaaaaatgaccatctgcacctaatcccagcaccaccaaatccagtccgccttcacgcgccagtttctgatcatgctcgcggtagttatcaatagtgagcttctggatattctcttctttgatccccgcaggggtgaaaaacagattacgcagattggtaatcgttacgccttctccctctttgccgcgaaatggaatttcatcaaaattatagaaatagcagttatcgtaccagggcttacctttaaccagggtggtgaggtattcatacatgcctttgggcgtgctaccggcggtaattgccaggttaacacgacgcgtcttgctcatataaccaagcagatggtgtgccgcgacacggctcatttcctggtaatcttcggtaatgattaatttcatcttaatgccttattttatttaaataatttctgtacaaaggctgcataggctggtcgccagacatccatttcatggttcagacccggatattcctggtaatcaaagttaatttttttctgctcaagctcagttttcagcccggcgatatccttgccggttacgacatctttatcccccacaaccacagtaaaattacgtagttgctggttgatagctgccggatcgttcagtcgggccgcgacaccttcatccggtacggttgtcgtggtaacaccactgaatgtggccagccagccaaagctttccagatgattcattccggaaaccagcgcctggtacccgccttgactaagccctgccagcgcgcggccatcggcatctttacggacattaaaacgcttgctaatcagcgggataatatcgttcatcagttcgcgatctgccgctttagcattcagcggataaaagactttacgtctttcctgaggcacgaaatcttcgggaataatgcccttcgcatcggtttctgtatccgggatcaccaccagcatcggtttaattttcccttcagcaagcaggttatccatgatttgcgggatacgcccctgatcgatagcggaacgtccggtatcaccaaagccgtgatagaaatagagcactggcaaaggctcgcccatgccggtgtatcctggcggggtccagacatacatctgacgttcagattgcaatgcgttggagtggtaagttatggcgatcaaatcaccatgcgcaacagaacgcgtatccagataactgcctggcaccagaatcatactggagttaacctggcgctgaggattagtcattgcggtgcctgtatcaatgctgcgtacaccatcaacattgaaaaaatactcgtacaggttgcctttcaggataggtgtgcgccagctccagactcctgcttcgtctttggtcatcgggtgaatattgtccggaaccggaacacccaccactacagagacattttttgccccaggggcaaagtagcgaaaggtcacgctgttatcggcattgacctgagtcacatactgtttcaccgggatagtgggtgccgggctggctggcatatccgctgctatggcccactgagcagaaataccgctggcaatagccagcgttaaagcagcaatttttatattcatcgtaatattcctttcattaagttccattaccaccagatttcagcctgggcaccgacagcaaactggtcgtctttattgtcttcaaaggtgaagccatccagttcgttttccagggctttgatatacgtggcgtagaaacgaatttccggacggctggtcaacatactggtattgactttaaaggtatggaagagcgtggttttataaccagactcattaaatttattactattcgcatctttgttttgctgggtgaaatagcccagttcaacacctgtctggttatattggtcccaaatataggccgggcgaacaaccgcacgaatagattcgaaatcagagtgggcgcctgtttcgtagctatatatatcgttaccgaaggagtaaacaatcgcgttagctacaatgaaatgatcgccaatataggcttcgccctggctagtcagacgtaccgctgttccgccggtgtgatcaccataataacgaccattaaaggtggtaaatggacttgcgccagcataacggccaaagttactggcgatagagttattcgcgaccaggaaggagaattcgttgaagccacctttatcaaatttctgcgttaaagatgtgccaaacatccaggtatctttccagtcataatacccgttattatcctgattatctttttcgcttgcgctttcgtttgccgtgacataacgaccacttaccattaaggtggctttatcccataacgggatatctttatagcgtaaatcaatggtattggtattaatctgctgtttgttttgcaggctgcgatcgtaatcatcgacatcttcgcgaaccagcgcgatatcaattttacccggaccgactttccagttttccagacctacacccgctgcggcatcagtacgctgcgttttccagtcaagcatctggatttcaattttcggcgcaccgtgtttacccacccagaaatcagcctctggcgcaaagggcaggaaacctttggtggtaacgtacatatcggagaactgcatatagttctcgccaccggcgttatcgccaaaccagccggtagagtactgctgaccaacgttaccatccatcatcacaacggcatcaacccgtttgccgttttcgttgtagacacgttgttttaactgcaaatcaaaccagccggagtattcgttaccaaagcggcccagagaaccaatcgcccaacttttaggactaccatgagaggcggtcccccaaccagaacggtaatagccgttgtaactaaagccaatttcatctttcacaaatttactgaaatctttcagagtcatggaagaataaatgctgcctgtctcactggcatttttctcttcatttttgaccagtacagcatcaggttttgcggcactactggtcgggaacggattggcggcatacccttgatcattcgtacttacgctacgattcaccgtcgctggcgtatactttttcttctcttcatctttatactttttgagttcgctttgcgtttctcttaacgccttttctaataactcaaggcgttgttccaccgttaaactttcagccaaactttgtgcagaaaaggctaacggtgccattaataagatggcagaggtaataagatttcgtctaaacataatatccctttatggtgcaaagaaagaattaacgcatcgcatccagactgttctgaatgcgacgataattaaggtgctttaatggttattttttttaaactcagcccccgcgtcttgatcacctctgcataccatccgaagcttttcttgcgtgttcttgtgaggcttccttcgccattatcatcacgatccacataaataaagccgtagcgcttagacatttgactatgagatgcactgactaaatcaattggcccccaactggtgtaccccataatatccacaccatcggcaatcgcttcatttacctgtaccaggtgatcgtttaaataggcaattcgataatcgtcctgtatgctaccatccgcttcaacgctgtcttttgcgcctaatccgttctcgacaataaataacggtttttgataacgatcccaaagcgtatttaacagaacccgtaatccaaccggatcaatttgccacccccactcactacttttcagatgcggattggggatcatattcagtatgttgccctgcgcatttttattaatgctttcgtcgtgggaaacacaaccagtcatgtaataactaaaagagatgaaatcgacggtatgttttaaatcttctgcgtcactttcagtcatctcaatggtgatattgtggtcgcggaagaaacgctgcatatagccgggatactggccacgcgcctgaacatcaccaaagaacatccagcgccggttctcttccatggcctgcaacatatcctgtggctggcaggtgagggggtaaaccagcccaccgagaagcatattgccgattttcgcttcggggagcaggctatgacaggctttaactgcccgcgcactggcaaccagttgatggtggatagcctgataaacttccgcctcgccactctcttctgccagccccacgcccgtgaatggcgcgtgtaagctcatgttgatttcattaaacgtcagccataacgccactttatgttggtagcgagtaaagaccgtgcgggcgtaatgctcgaagtgatcgatgaccgctcgattagcccaaccgccgtagtttttcaccagcccatatggcatttcgtaatgggataacgttaccagcggcttgatccccgcctgcgccatttcatcaaacagccgatcgtaaaacgctaaccccgcttcattcggttcgacttcgtcgccctgagggaaaattcgcgcccaggcaatggaaatacgcagacaggtgaagcccatctcggcaaataacgcgatatcttccgggtaacggtgataaaaatcgatggcgacatctttgatattctctttccccaggatgcgcggttccatttttcccattacgccatgaggctgtaaatcactggtgctgatccctttgccatcttcctgccaggcaccttccacctgattggcagctgttgcgccaccccaaagaaatgtttctggaaatgctttcataattaactccttttatcgttagcgaatgatggataacagcggttcacctgcgcttatctgcgccgtgccgtggggtaatacgtccgtaaaatcatcgctattactgattaataccggcgtcgtcagatcaaatccggcctcgcgaatagcagggatatcaaaagaaatcagccgatcgcctgtattgaccttgtcacccacgttgacgtgagcggaaaagaatttgccgtccagttttacggtgtcgataccgacatgaatcaggatctccacaccatcatcactctcaatgccaatggcgtgtaatgtggcgaacaagctagcaattcgacccgcaaccggagaacgcacttcaccaacgctgggcagaatggcaatacctttacccaacaggccactggcaaacgtggtatcagcgacgtgaatgagcggcacaatctctcccgtcatcggactacagataccgccctgctcaggtggtgtaataacctctggtgttttctcttgcggggcaccctgcgctggctgacgtttagcggtgatgaaatgaagcatcaccgtaccgacaaatgcgcaaccgatggcaatgacaccgccaataacgctggcccagacggtgaaatcaattcccgtactcgggatggtttgcatgaaggtgaaaatacttggcaaaccaaaggagtagactttcgtttgcgcgtagccaataatggtggccccccaaagccccactgatacaggcgataacaaaggggtacttacgcggcaggttgacgccatataccgctggttcggtgataccaaacagactcgtcaacgccgcacttcccgccaccacttttttctgcgcatcgcgttcgcagaggaagacgccgagcgccgccccgacctgcgccataatggcgggcattaacagcgggatcatggtgtcgtagcccagcacggtgaagttattgatacacagcggcaccaggccccagtgcagtccgaacatgacgaagatttgccagaagccgcccattaccgcgcccgcaaatgcaggaaccgcctgataaagccagagataaccggcggcaatcagttcgcttatccaggtacttagcggccccaccagcagaaaggtgacgggtgtgataaccatcagacatagcaatggtgtgaagaaatttttgattgcgctcggtaaccacgcattaagtcggcgttccagaatgctgcacaaccaggcagaaaaaataatgggaataacgctactgctgtaattcaacaatgtgaccggaatacccaggaaatccagccccagcgcatccgctttttgcccgttctcgaaagcagtcagaattaatggatgcactaacgctccaccaatcaccatggcagtaaatggattaccgccgaagcgtttccccgcggtgtatcccaggattatcgggaagaaccaaaacaaggcatcactggcgctgaataaaattaaataagtaccactttgttcggtcgtccactgaaaagtgagcgccagagccagcatacctttcaagatcccggttgccgccatcaaaccgatcagaggcgtaaaaataccactaataacataaacaaagcggtttagcagattacctttatcatcattttccggtgcctgttgcgctttttcgtcaaggcctgccacactgttaaccgccaggaagacatcggccacatggttacctatgaccacctgaaactggccaccgctttccaccaccataataataccgggggtctttttcagtacctctgcttgcgctttgctttcatcctttaatttaaaacgtaatcgcgttgcgcaatgcatcagactcacaatgttatctgcgcccccgactcctgcgactatttttctggctaactccgtcataacttgccctctaccgctttgcggcaaaactccaaaaaaaaacctgaaaaaaacggcctgacgtgaatcaagcaatttttttcaggttttgcccgcttagtgcggtaacaatcctttactcagtaataatatttcagtgttctttgcgcacgcgctctatatttatggctaaaaacataatctctgcgggactaattttacgttgatactgcaaaccaataaaaatggcgatccgttccgcacattgccatgcttgcgggtaattttgttttactgcttgttgtaaactttcatcactatcgttaatactagcatgttcaagaatacgccaggataaaaacttcagatgtgtaaccagtcgctgataactcaagctttcttcctggtaattaaggctgaactgaaattttattaattgcagcatttcgcgcattaactgcgtgacacctgcaacatcctccatatttccgctcatttgggcactgaccagatgcatggcaataaagcccacttcatctttcggtaactgcacgcccaaccgtttatcaataatggttaacgcttcttcccctagctggaactctttcgggtaaagccgctggatatcccacagcaacgggttgggcagcaacacgttttgctgaaagcgtttaatcgcaaactggcaatggtcagttaggctgatataaatactgtcctgtaattttcccaagcgctcctgcgctaaagagataatacgatcacaggttgccatcacctcaagaggaatatgacttaagagttcgcttaatcgcccgttcagttcatgactgctcaaggcatactctttttctattccactactgttaattctttcgccagcgcgtttttgaaagccaattccgcgccccatgacgactttttcccgctgttgatcatcaataaccaccacaacattattgttgagaattttggtgatttgcatgttcatagcaaggaccttttttataaacaaaaaaacccgacttcaccagtattctctggttatgtcaggttttgcctgcgaatgcagtaacaatccagtcatttattaatggtttttataacgaacatccaggttcggaaattaatttaattgcgtgcagagaaaatagcaatgcgctattgataaaaatatgaccatgctcgcagttattaactttgtgtaattttaggaatttataaagttatatataacaaatcccaataattaagttattgggatttgtctggtgaattatttgtcgctatctttccccgccagcagtttatccagctcatcgccaccgacgtgacggaaatcctgccccttcacgtagtagaagataaactcacaaatattctggcagcggtcgccaatacgttcgatagaacgcgcgcagaacagcgcagtaagtacgctcggaatggtacggctatcttccatcatgtaggtcatcagttgacgaacaataccttcgtattcctgatcgacttttttatcttcacgataaatacgtaccgcttcgtcaatgtccatccgcgcgaacgcgtccagcacgtcgtgcagcatctggatggtatgacggcccaggctctccagacttaccagcaacggctgatgctgctgggagaatttctccagcgcagtacggcagattttgtccgccacgtcgccaatacgctccagctcggcaatggttttactgatcaccataaccagtcgcaggtcgctcgccgtcggctgacgtttggcgataatgcgcacgcaggcttcatcgatcgccacttccatcatgttgacgttcttgtcgccttcgatgacgcgcttcgccagatcgctgtcctggttatgcatcgcggtgattgcatcagaaagctgctgctccaccatgccgcccatggtcatcacctgcgtgcggatactttccagttcggcgttgaactggccggaaatatgtttattaagattgagactgtccataacgcactcctgaatcaaccgtaacgaccggtgatgtagtcttctgtttgtttcttcgctggcttggtgaacagatcgtccgtgttgctgaactcaatcaattcgcccaggtacataaacgccgtgtggtcggaacaacgcgcagcctgctgcatgttgtgggtgacgatcaccacggtgtaatcctgcttcagttcggtgatcagctcttcaatacgcccggtagagatagggtcgagcgcgctacacggttcgtcgagcagcagcacttccgggcgaatggcgataccacgcgcaatacacagacgctgttgctgaccaccagagagagagtaaccgctctggtgcaatttatctttggtttcgttccacaatgcggctttggtcaatgcccactgcacgcgctcgtccatgtcggcacgggagagcttctcaaacagacgaacgccaaaagcgatgttgtcgtagatggacatcggaaacggcgtcggtttctggaacaccatgcccactttcgcacgcagcagtgcgatatcctgagagttggtcaggatgttgtcgccatcaagcagaatttcaccttccgcacgctgctccgggtacagttcaaacattttgttgaaggtacgcagcagcgtgcttttaccgcagccggacggcccgataaacgccgttacctggtttttagcgatatccaggttgatgtttttcagggcatggaatttgccgtagtagaagttcaaattacgaacctgaattttactcggggcagtttcaaccatactcattgcaatcttttcctcatcgtgcctgatgcacttcgctaatcaggcttaccgtaggccggatcaggcgttcacgccgcatccggcaaagtgttaaccgtgtacagagtcaaaaaggcgctcggtcggtcccctcgcccctctggggagagggttagggtgaggggaaaaccgtgtcagcaatatcaaccgtgtttattcttcgcaaaaacaacgcgcgccagaatgttcagcagcagtacgcacagggtaatgatcaataccccggcccaggccaattgctgccattccgcaaacgggctcatcgcaaacttaaagatcgtcaccggcaggttggcgatcggctgcatcatgtccgtgctccagaactggttggagagcgcggtaaacagcagcggcgcggtttcaccagcaatacgggcaatcgccagcaggataccggtcataatcccggacacgctcgctttcagcgtaatcgcagagatcatcttccacttcggtgtacccagcgcataagccgcttcacgcaggctgtacggcaccagtttcagcatgttctcggtggtgcggataacaatcggcacctgcaacaacgccagggcaatcacgcccgcccagccggagaagtgctccatctgcgccaccacaatggtgtaaacaaacagaccaaccacaatgctcggcgcagagagcagaatgtcgttaatgaagcgaatcacttctgccagccaggatttacgaccatattccgccagataaatccccgccataatgcccagcggcgtaccgaataccgtggcccacaaaattaacagcccgctacccgccagagcgttcgccagaccaccaccttccgtattgggcggcggcgtcatttcagtgaacagcgccaggctcataccgtcgataccgcgagtgatggtggacattaaaatccagatcagccagaacaggccgaaggccatcgtcgccatgctgagcgtcagcgcaatacggtttttgaggcggcgacgcgcctgcattttgcggcgagattcagccagcgccgcagtggtttgcatttcaaccatagccattagcgtgccccctcattcttagccaggcgcataatcataaacttgcttgcggcgaggacgatgaaggtaatcacaaacaggatcaggcccagttccatcagtgcggcaacgtgcagaccggattccgcttccgcaaattcgttcgccagcgcagaggtgatactgttgcccggcatatacaggctggcgctgtcgagctggtaggtgttaccgatgataaaggtcaccgccatggtttcaccgagcgcgcggcccagccccagcatgatgccgccgataacaccatttttggtgaacggaagaacgatacgccagataacttcccaggtggtgcagccaataccgtaggcgctctctttcatcatcaccggggtttgttcgaacacatcacgcattaccgccgcaatgtacggaataatcatgatggcgaggatcacgcctgccgcgaggataccgataccaaatgcggggccagagaacagcgcgccaacaatcgggatattgctcatgatattgccgaccggctcctgaaagtaaacggcgaacagcggcgcaaagataaacaggccccacatgccgtaaacgatacttggaatggctgccagcagctcaatggcgatacccagcgggcgtttcagccagccaggcgcaagctcagtcaggaacagggcgataccgaaactcaccgggacggcgatcagcagcgcgataaagctagtcaccaacgtaccgtagatcggcaccagcgccccgtagatatcgttcggtgcatcccactctttggtccataggaaagccagaccaaatttctgaatgctcggccaggaggagatgatcagagagacaataatgccacccaacatcaatagcacaatcagcgccgccagttttaccagcacgctgaaaattatgtcgccctttttacccggtgggttaaaagcaggcttggttgcagccataagttactcttcagttaaacgcgtttacaaagtcattttgtaatgccggatgcggcgtaaaacaccgtacccggcctggagttttattagtacagcggcttaccgctactgtctttaatattggtcttccacgcagcgcgaacctgttcaactacactatccggcaggctggcgtaatccaggtcgttcgcctgtttagccccggttttgtacgcccagtcgaagaatttcagcacttctgtgccttgttctggtttcttctgatctttgtggatcagaatgaacgtggtagaggtaataggccatgcatcttcgcctttctggttggtcagatcctgagcgaaggttttgctccagtctgcaccttttgctgcattagcgaagttttcttcggtcggactaaccggtttaccatcagcggagatcagtttggtgtacgccaggttgttctgcttcgcgtaagcatattcaacataaccaattgcacccggcagacgctgaacgaacgcggcgataccgtcgttacctttaccgcccagaccgatcggccattttacggtagagccagtaccaacgttgtttttccactcttcgttcactttcgccaggtagctggtgaagacgaaggaagtcccggagccatctgcgcggcgtactacagcaatgttttgactaggcagtttcagacccggattcagtttggcgatggcttcatcatcccacttcttgattttgcccaggtagatgtcgccgagggttttaccatccagcaccagttcgccagacttcagccctggaatgttaaccgccagcaccacgccgccaatcacggtcgggaactggaacagaccttcctgagccagtttttcgtcagacagcggcgcgtcagaggcaccaaaatcaacggtattagcgataatctgttttacgccaccggaagaaccgataccctggtagttaactttattaccggtttctttctggtaagtgtcagcccatttggcatacaccggcgcagggaaggttgcacctgcacctgtcaggcttgcttctgcaaacacagagaaagcactcatgcttaaggtcgcggcgacaacagttgcgacggtggtacgcataactttcataatgtctcctgggaggattcataaagcattgtttgttggctacgagaagcaaaataggacaaacaggtgacagttatatgtaaggaatatgacagttttatgacagagagataaagtcttcagtctgatttaaataagcgttgatattcagtcaattacaaacattaataacgaagagatgacagaaaaattttcattctgtgacagagaaaaagtagccgaagatgacggtttgtcacatggagttggcaggatgtttgattaaaaacataacaggaagaaaaatgccccgcttacgcagggcatccatttattactcaaccgtaacgctttttgccaggttacgcggctggtcaacgtcggtgcctttgatcagcgcgacatggtaagccagcagctgcagcggaacggtgtagaagatcggtgcaatcacctcttccacatgcggcatctcgatgatgtgcatgttatcgctacttacaaaacccgcatcctgatcggcgaagacatacaactgaccgccacgcgcgcgaacttcttcaatgttggatttcagtttttccagcaattcgttgttcggtgcaacaacaataaccggcatatcggcatcaattagcgccagcggaccgtgtttcagttcgccagcagcgtaggcttcagcgtgaatgtaagagatctctttcaacttcaatgcgccttccagcgcgattgggtactgatcgccacggcccaggaacagcgcgtgatgtttgtcagagaaatcttctgccagcgcttcaatgcgtttgtcctgagacagcatctgctcaatacggctcggcagcgcctgcagaccatgcacgatgtcatgttcaatggaggcatccagacctttcaggcgagacagcttcgccaccagcatcaacagcacagttaactgagtggtgaatgctttagtggatgccacgccgatttctgtacccgcgttggtcattagcgccagatcggattcgcgcaccagagaagaacccggaacgttacagattgccagactaccaaggtaacccagctctttgctcagacgcaggccagccagggtatccgcggtttcgccagactgactcaaggtgatcatcaggctgttacgacgcacggcagatttgcgatagcggaattcagaggcgatttcgacgtcgcacggaatacctgctaggctttcaaaccagtagcgggaaaccataccggagttataagaagtaccacaggcgaggatctgaatatgctcaaccttgctcagcagttcgtcggcgttcggtcccagctcgcttaaatcaacctgaccgtggctgatgcgtccggtaagggtgtttttgatcgcgttcggctgttcgtagatctctttctgcatgtagtgacggtaaatgcctttatcgcccgcgtcatattgcagattggattcgatatcctgacgttttacttccgcgccagttttatcgaagatgtttacgctacggcgagtgatttccgcaatatcgccctcttcaaggaagataaagcgacgggtcaccggcaacagcgccagctggtcagaagcgataaagttttcgcccatccccaggccaatcaccagcggactaccagaacgtgccgccagcagggtatccgggtgacgggagtccatgatcactgtaccgtacgcaccacgcagctgcgggatagcacgcagaacggcctcacgcagagtcccgccttgtttcagctcccagttcaccagatgggcaatcacttcggtgtcggtttcagaaacgaaggtatagccacgcgcttttagctcttcacgcagcggttcatggttttcgatgatgccgttatgcaccaccacaatgtgttcagaaacatgcggatgcgcattcacttcactaggttcaccgtgggtcgcccagcgagtgtgagcaataccagtgccgccatgcagaggatgttcttccgctgcctgtgccagcatctggactttaccgaggcgacgcaggcgggtcatatgaccttctgcatcaacaacggccagaccggcagagtcatatccgcggtattccagacgacgtaaaccttcaagaaggatttctgctacatcacgttgcgcgatcgcgccaacaattccacacatagtttttgattccgatttatatcgttgtcggtcaacctgtatgcccgttttttcgggcgccccgagccttgtagagagtggggttatttttatagttactgcttgtgggagggagattatgttatctcctcatcccatgtgaccgggttagccggccagaatcactttttctttaccggacgacgccagccttctttctgagtctgcggcacacggctgatagctaatgcattttcgccgacattacgcgtcacagttgtacccgcagcaatggtcgcgcctttgcctactgttaccggggccaccagctgagtgtcggaaccaacaaacacatcgtcgccgataatggtcttaaatttattcgcaccatcgtagttgcaggtaatggttcccgcgccgatgttaacgttatcgccaatttccgcatcgcccaggtaagtcagatgaccagctttgctgcctttacccagacgcgcttttttcatctcaacgaagttaccgacgtgagcaccttccagcaactcagcaccaggacgcaaacgggcaaacgggccaatggtacaggccgctgccagattcgcatcttccacaacggtatacggactgatttcgcaatcatcgccaatcacgctgtttttaatcacgcaaccggtgccaattttcacgcgatgaccgagagtcacgttgccctcgatgataacgttagtatcaatttcaacatcgcgcccgtgagttagcgtaccacgcagatcaaaacgcgctggatcgcgcagcataacgcctgctaacagcagtttttcagcctgttcggactgataaacacgctccagacgggagagttgcaggcggttattcacgccttctacttcgcttaaacgttgcggatgaacggcgacgatttcacgcccttcctgatacgccagcgcaataatgtcggtgatgtagtattcgccctgagcattattgttggtcagcttcgccagccagcgtttcatatctgcgccgttggcaatcagaatgccggtgttgatctcctgaatctgacgctgctcgtcggtggcatctttgtgctcaacaatgccggtaactttgccgttttcacgggtgatacgtccataaccggtcggatcatccagtttcaccgtcagcagaccaatgccaccctgcggtttagcatcacgcagacgctggagtgtttcgacagagatcagcggcacgtcgccgtagagcattaaaatgtcttcatcatcggcaaagaaaggtgcggcctgctgcattgcatgacccgtacccagctgctctgcctgaagcacccagttaaggttgtcgtctttcagcgcctgttttagcagatcgccgccgtgaccgtacaccaggtgaacgtgcgctgcgcctaattcattcgcagcatcaatgacatgctgaaccatcgctttcccggcaagggtatgcagcactttcggaagatcggaatacatgcgcgtgcctttgcctgcggcaaggatcactacgctcatagcattattcaacatacgcgtcctgactgtaatttgagaacgaatttaaaccgcttcaccttgaaaaaactacatttttttcatcgtgaaatggacagaggataaattgttcaataacggattatccccgctgacgaaagcgccattttcgaccatcgtcacgccttttgtctgcagaaaattaaggcagtaccttaatttaagcgtcaggtggatgtttttgctcttatttcgatcaatgaataaacaggaaaacaggggggttttatatcagcaggatctatgtgaacgctattcaggacgggtcacacgcgcaaaaaaaagccagcctgtttccagactggcttttgtgcttttcaagccggtgttacatcgcttttttggtcaactcgataacgcgcagctgcgcgatcgctttggccagttccgcagacgcctgagcgtaatctacgtcgccgtgagagctgctaatgtgctcttcagccttacgtttcgcttccatggctcgcgcttcgtcgagatcctggccgcgaattgcggtgtcggccagaacggtcacgttgccaggctgcacttcaagaatgccgccagacagatagataaactcttcgtgaccgtgctgtttcacgatgcgaatcataccaggcttaatggcggtgagcagcggtgcgtggccagggtagatccccagttcaccttcgctacccgttacctggattttctcgaccagaccagagaacatttgttgctctgcgctgacgacgtccaggtggtaagtcattgccatatcaccctccgattaaggcgttaaagttttttggctttttccacagcttcttcgatggaaccgaccatgtagaacgcctgctccggcaggtgatcgtattcgccttccatgatgcctttaaagccacggatggtgtctttcagggagacgtatttacccggagaaccggtgaatacttctgccacgaagaacggctgggacaggaagcgctggatcttacgagcacgcgctaccaccagtttgtcttcttcagacagttcatccatacccaggatggcgatgatgtctttcagttcctgataacgttgcaggatggactgaacgccacgcgcggtgtcgtagtgttcctgaccaaccaccagcgggtccagctgacggctggtggagtccagcgggtcaacggccgggtagatacccagagacgcgatctgacggctcagtaccacggttgcgtcaaggtgcgcaaaggtggttgccggagacgggtcagtcaagtcatccgcaggtacgtatactgcctgtacggaggtgatagaaccagttttggtggaggtgatacgttcctgcagaacgcccatctcttccgccagggtcggctgataacctaccgcactaggcatacggcccagcagtgcggatacttccgtaccggccagggtgtaacgatagatgttgtcaacgaacagcagaacgtcacgaccttcgtcacggaatttctcagccatggtcagaccggtcagagcaacgcgcagacggtttcccggcggctcgttcatctggccatacaccagggatactttgtcgataacgttggagtcggtcatttcgtggtagaagtcgttaccctcacgagtacgttcacctacgcccgcaaacacagagtaaccggagtgctcgatcgcgatgttacgaatgagctccatcatgtttacggttttacctacacccgcaccaccgaacagaccaactttaccgcccttagcgaacggacacatcaggtcgataactttgataccggtttccagcagttcctgagagttactcagctcttcgtaggaaggtgctgcgcggtgaatcgcccaacgctcttcttcaccgatctcgcctttcatgtcgaccggttcacccagtacgttcatgatacggcccagagtcgctttacctaccgggacttcaatcgggtgttcgaggtcttttacatccagaccgcgacgcagaccgtcggaggaacccattgcgatggtacgtacgataccgccgccgagctgctgctgaacttccagcaccagacgctcattaccattttgcacctcaagagcatcgtacacgcgcggtacggcatcctgagggaattcgacgtcaactacggcgccgattacctggacaatctttccagtagccatcttaaatcctctacgaaataacctgtttaaaccgcggcggccccgctgacgatctcggtgagttcctgagtaatgctggcctgacgagctttgttgtataccaactgcagctctttaatcaggctgccgccattgtcggtcgcggctttcatcgccaccatacgggcggcctgctcgctggccaggttttcaaccacgccctgataaacctgagattcgacataacgacgcagcagggtatccagcaacgccttcggatcgggttcgtacaggtaatcccaggatttatgtttcagatcatcatcatcacttgccggtaacggcagcagctggctgatggtcggaacctgagacatggtgttaataaatttgttgctgacaatgtaaagcttgtccagacggccttcgtcgtaggcctgcaacatcacttttaccggaccgatcagttcggacagggaagggttatcccccatgccggtgacctgggcaacaacattgccgcccacggagttgaagaagctcacgcctttgctgccgatcattgcgaggtcgcattgaacgcctttgtcggtccaggtcttcatttccgccagcagttttttgaacaggttaatgttcaaaccaccgcacaaaccacggtcggtgctcaccaccaggtagcccacgcgtttaacgtcgcggtcttccaggtaagggtgcttatattccagattaccgtgtgcaaggtgaccaatcactttgcgcatggtttctgcataaggacggctggccgccatgcgatcctggcttttacgcattttggaagcggcgaccatctccatcgctttagtgatcttttgcgtgttctggacgcttgcgatcttactacgtatctcttttgcgccggccatgagcttctcctcaatgccttgcggcctgccctaaggcaagccgccagacgttaccaggattgggttgctttgaaggaatcgaggatgcctttcagcttgccttcgatttcgtcgttgtagccaccggtctggttgatctcttgcatcaacggagcgtgatcacggtcgacgtaagccagcagagcggcttcgaagctgccaattttgctcagttcaacatccgccaggtaaccacgttctgctgcgaacagaaccagagactgctgcgcaacggacatcggcgcatactgtttctgtttcagcagttcggtcactttctgaccgtggtcaagctgcttacgtgttgcatcgtcaaggtcggatgcaaactgagagaacgctgccagttcacgatactgtgccagagcggtacggataccaccggacagttttttcatgatcttggtctgtgctgcaccaccaacacgggatacggaaatacccgggttaaccgcaggacgaataccggcgttgaacaggttggtttccaggaagatctgaccatcggtaatggagattacgttggtcggaacgaacgcagaaacgtcacccgcctgagtttcgataatcggcagtgcggtcagagaaccggttttccctttcacttcacctttggtgaaggcttcaacgtattcggcgttaacacgtgcagcacgctccagcagacgagagtggaggtagaaaacgtcgcccgggaatgcttcacgtcctggcggacgacggagcagcagggagatctgacggtaagcaacagcctgtttagacaggtcatcgtaaatgatcagcgcatcttcaccgcggtcacggaagtattcgcccattgcgcaaccggcatacggtgccaggtattgcagtgcagcggattcagacgcggttgctaccacaacgatggtgttagccagtgcgccgtgctcttccagtttacgtaccacgttagaaatggtggacgctttctggccgatagcgacatagatacatttgataccggaatcgcgctggttgatgatggcatcgatagccagtgcggttttacctgtctgacggtcaccgatgatcaattcacgctgaccacgaccgattgggatcatggagtcaacggctttataaccggtctgtaccggctgatctacggactgacgttcgataacgcccggagcgattgcttctacagcagagaagccgtcgtgatccagcggacctttaccgtcgattggtgcacccagagtgttaaccacacggcccagcaggccacggccaaccggaacttccaggatacggccagtacacttaactttcatgccttcggcaaggtcagcgtacggacccataacaaccgcacctacagagtcgcgctcgaggttcagtgcgatagcgtaacggttacccggcagggagatcatttcaccctgcatacaatcggccaggccgtgaatgcggataacaccgtcacttacagaaacaatagtaccttcgttgtgagcttcactcacaacattgaactgagcaatgcgctgcttgatcagttcgctgatttcggtggaattcagttgcatgctccagtccccttaagactgcaagacgtctgcaaggcgctcaagacgaccgcgtacgctgccatcaatgaccatatcacccgctcggatgataacgcctgccattacagacttatcgattttgcaattcagcttaactttgcgactcagacgtttttccatcgcagcagaaattttcgcgagctgttgttcactcagtgcggcagcggaaatgacgtctacctcagcggtagcctcactcacggcacgcaggtgaataaactgctccagaacatccgggagcgcgttaagacgaccattttcagccataacccgaatcaggttctgaccgttttcgtccagttgctcaccacaaactgcgataaagctctcggcgagcgtttctggcgcaagcgcgccagagagaagctctgccatttgttcgtttttggttacctcggcggcaaacgccagcatgtcctgccagcgttctacactttggtgttcgacggcaaagtcaaaagctgctttggcgtaggggcgagctaccgtaataaattcagacatcagcccctccctccttacagttcagcgacaagtttatccacgatgtcgctgttagcagcttcatccacggaacgttcgatgatcttctcggcgccagcaacagccaggatagcaacttgcttacgcagctcttcacgggcacgtttacgctcggcttcaatttccgcctgcgcctgggccacgattttagtacgttcctgttctgcctcagctttcgcttcgtccagaatctggctgcggcgtttgttcgcctgctcgatgattacctgggcttccgctttcgcttttttcagctggtcggtcgcgctggcctttgcaaggtcaaggtccttatgtgctcgttctgcggaagcaaggccgtcagcaatttctttttgacgtttttcgatggctgccattaatggcggccatacgtacttcatgcagaacagaacgaacaggacaaacgcgatggcctggccgaggattgttgcgttaagattcacagcacaatgcctctatttagttaacgttctgatattgctctttaaataaaagcaacgcttattacgcgacagcgaacatcacgtacagacccagacctacagcgatcatcgggatagcatccaccagacccataacgataaagaactgagtacgcagcagaggaatcagatcaggttgacgcgctgcgccttccaggaatttacccccgaggatgccgataccgatcgcagcaccgattgccgccagacccatcatcacagcggcagccatgtacagcagatccatattcaggttttccatgacagtctccagtttgtttcagttaaaacgtagtagtgttggtaaattaatgttcttcagacgccatgctcagatagacgatcgtcagaaccatgaagatgaaggcttgcagcgtaatgatcaggatgtggaaaatggcccacggcacattcaggatccactgactccaccacggcaacagaccagcaatcagaatgaaaatcagctcaccggcatacatgttaccgaacagtcgcaaaccgagactaactggtttggacagcaggcttaccccttcaaggattaagttgacaggaatgaacgcccagtgattgaacggctgcagcgtcaactctttcgtgaagccgccgatgcctttcattttgatgctgtagaacagaatcaggataaatacgcccagtgccatagacagcgttacgttcacgtccgcagacggaaccacacgcagtgcaggcagacccagtacatgttcagcaatgtacggcagcaggtcgataggcagtaaatccatcaggttcatcaggaatacccagacgaagatcgtcagggccagcggagcaatcagcttgcttttgccatggtacatgtctttcacgctaccattaacaaagccgatcaccagctcaatcgcggtctgaaacttacctggcacaccgctggtcgcctttttggctacgctacggaataaaaccaggaacaacagacccagcaccacgctgaagaacatggagtcaatattgattgtccagaaggtggctggggggttttgtggatccaccaggctgaatgtacgcaggtccagctgaaggttattcaggtggtgtcctatgtaatcctgcggcgtcatattttcactagccatgatgccttttaccctttgttgttaattacagccggtgccagtatctgaaccaccagcaccaaaacccacgtaacgatcagcggcaagaataccgcctttaaaaccgccaacgccaccaccagtaacaccaacatcgccagaactttgaaagcttcgccaaatgcgaatgtccaggccacccggcctttcgctggtgtatgcgcctggtgacgccaggcaaatatcataaacaaaacgttaggcagaaagactgccaggcccccgcttattgcagagacgccccagaaggggtctttgaggctgaacagcaatccacttgctatcaccaccagtaactgaacgagcagaagcttccgagcaacgtttcgactcacgaggctcacagacatcacgtttttcactcctgctcccttcgaggtatgccgcgtgtcgtataaaactttctttaaggcttagagtcaagcatcaaaaagcggtcaaattatacggtgcgcccccgtgatttcaaacaataagtagccaaaaggtgaataaatgtttaaatatttttccagtgcatacaattgcgacttttctgctaaccctgttcgatcatgaaaaactgtaaataacgcgtaaacactggtgataaagcgtgcttcagatcacatattgcgcatgttcgcgcacagcatatttatttacttggcaaatgatgcctttgcaagtttatgatatttcagtctaaaaacagatactgttttaataaatgacatttacacaacaaaaaccacccattgacatttttaataatgttttaacagccaatgatggttcttagcgccgatttttagcagactgatattttcactaatgacttattttctgcttaccaaaaaaagccacgttatcttgttgatgcaaaagagtgaacgtggcgttaaatgtaaccagttatatcagtagaaaacctggttgttgttaacagtctaaccggtcaattttttatgatttttttgataaaaattaaattttatttgctttaatcaccaccagatgacgttcgccatccagggctggaacctgaagtttaaccacactttcgacctgatattcttcgggcaacaaagcgatttcatcttccggcatttgccctttcagcgcgtagaaacggccttgctcaccaggaagatggtggcaccagctcaccatatcgttcagagaggcaaaagcgcggctaattacgccatcaaatggcggctcactaggaaactcttctaccctgctctgtactggttcaatattctccagtttaagctcatgttgcacctgacgaaggaaacgcacgcgtttaccaaggctatccaacagagtgaaatgggcttcaggacgcacgatagagagtggaatgcctggcagtcctggtccggtgccgacatcgataaaccgttcaccttgcagatacggtgccaccacaatgctatcgagaatatggcgtaccagcatctcattaggatcgcggacgctagtcaggttgtacgctttgttccatttatgcagcatattcacgtaggcaataagctggtttttctggtgatcggtaaggctaatacctgcgtctttcagcagtaaggagagtttgttgagcacggtgattacctgttcttgatgcgttgcctggtaagcgggtgcttaccaggcatttttaatgcgttatgcgctacgacgcagcataccctgttttttcagccacaccagcagaatggagatggccgcaggcgtgacgccagaaatacggctagcttggccgatagaggctggtttgtgatcgttaagtttggcgatcacttcgttagaaagaccggatacctggcggtaatccagtgtcgcgggtagcagggtgttctcgttacgcagctgcttttcgatctcatcttgctggcgcgcgatataaccttcgtatttaacctgaatctcaacctgttccgccgcctgttcgtctgtcaacgcaggggcaaacggcgtcagcgtggttaatttttcataagtcatttccggacgacgcagcagatcttcaccactggcttcacgggaaagcggcgcagtcaggtgagcattcacttcggctgcagcttccgcgctcggggttacccaggtgcttttcagacgctgacgctcacgctcgatattctcaagtttctcgttaaagcgcgcccaacgttcgtcatccaccaggcccagttcacgaccgatttcagtcaaacgcagatccgcattatcttcgcgtagcatcagacgatattctgcgcggctagtaaacatacgatacggttctttggttcctaaagtgcacaggtcatcaactagtacgccgagatacgcctgagaacgtgccggagcccaaccttctttgtcagcagacagacgggcagcgttaagaccggccagcaaaccttgcgcagcggcttcttcgtaaccggtagtgccgttaatctgaccagcaaagaacagcccctggataaacttgctctccagcgtcggtttcaggtcgcgaggatcgaagaagtcatactcaatggcataacccggacgcacgatcttcgcgttttccatcccctgcatagagcggacgatttgcatctgcacatcgaacggcaggctggtggagataccgttcggataaatttcattagaggtcagtccttccggttcaaggaagatctgatgctgatttctgtcggcgaagcgcatgactttgtcttcgatgctcgggcagtagcgtgggccgacaccttcgatcacccctgcgtacattgggctacgatcgaggttactgcggatcacatcatgggttttctcgttggtatgagtgatataacacggcacctgctggggatgctgggacgcattgcccataaagctgaataccggcattgggttatcgccatgctgttgcgccagtacgctaaagtcgatggttcgagcatcaatacgcggtggtgtcccggttttcagacgaccaacgcgcagcggcagttcacgcaaacggcgagaaagcggaatggacggcggatcaccagcacggccaccgctgtaattatccagaccgatatgaattttaccgtcgaggaacgtcccaacggtgagcacgacggctttggcacggaacttcagtcccatttgggtaacagcaccgaccacgcgatcgttttcgacaataagatcttcaaccgcctgctggaagatcatcaggttcggttggttctccagcgccgtacgtaccgcctgacggtagagcacacgatccgcctgagctcgggtagcgcgaaccgccggtcctttgcttgcgtttagtatcctaaactggatacccgcctgatcgatcgctttcgccatcagaccgccgagtgcatccacttcttttaccagatgtcccttcccaataccgccgatcgccgggttgcagctcatctgccccagagtgtcgatattgtgtgtcaaaagcagagtctgttgacccatacgcgccgcggccatcgcggcctcggtgcctgcatgacccccgccaatgatgatgacgtcaaaaggatccggataaaacatggtgattgcctcgcataacgcggtatgaaaatggattgaagcccgggccgtggattctactcaactttgtcggcttgagaaagacctgggatcctgggtattaaaaagaagatctatttatttagagatctgttctattgtgatctcttattaggatcgcactgccctgtggataacaaggatccggcttttaagatcaacaacctggaaaggatcattaactgtgaatgatcggtgatcctggaccgtataagctgggatcagaatgaggggttatacacaactcaaaaactgaacaacagttgttctttggataactaccggttgatccaagcttcctgacagagttatccacagtagatcgcacgatctgtatacttatttgagtaaattaacccagcttcccagccattcttctgccggatcttccggaatgtcgtgatcaagaatgttgatcttcagtgtttcgcctgtctgttttgcaccggaatttttgagttctgcctcgagtttatcgatagccccacaaaaggtgtcatattcacgactgccaataccgattgcgccaaagcggactgcagaaagatcgggcttctgttcctgcaatgcttcatagaaaggagaaaggttgtccggaatatctccggcaccgtgggtggagctgataaccagccagatcccactggcaggtaaatcttctaacagcggaccgtgcagcgtttcggtggtaaaacccgcctcttccagcttttcagccaggtgttctgctacatattcggcaccgccgagggtgctgccgctgataagagtgatatctgccataaaccgccacctttattaagagtggcgtattgtacgctgtgaacgcgttgggatctacctgtggaaaagtatgggattaaaaaagccgatcagggcttgatggtacgcatgatcgggttttgcaggacgatcaatgtctcggtggactgaatttcatcaattgtttggatcttgttgataagtacatgctggagagcgtcgatgctacggcacatcacttttataaagatgctgtagtggccggttgtgtaataggcttcagtgacttcatcaaggctttccagctttgccagcgcggaagggtagtctttggcgctctttaatataatgccgataaagcagcctacgtcataaccgagctgcttcgggctgacatcaatacgcgccccggtaatgatccccgcctgcttcattttctctactcgaacgtgaatcgtccccggactgacgccaaattgtttcgccagttcggcgtaagcggtgcgcgcattgcccattaatgcttccaggatgccacggtccagattgtcgatcagataattttccataggattttcttatgcggattgatgattcattctattttagccttcttttttaatgaatcaaaagtgagttaggctttttattgaatgattattgcatgtgtgtcggtttttgttgcttaatcataagcaacaggacgcaggagtataaaaaatgaaaaccgcttacattgccaaacaacgtcaaattagcttcgtgaaatctcacttttctcgtcaactggaagaacgtctggggctgatcgaagtccaggcgccgattcttagccgtgtgggggatggcacgcaggataacttgagcggctgtgaaaaagcggtgcaggtaaaagtgaaagctctgcctgatgcccagttcgaagtggttcatagtctggcgaagtggaaacgtcagaccttagggcaacacgacttcagcgcgggcgaagggctgtacacgcacatgaaagcccttcgccccgatgaagaccgtctttctccgttgcacagcgtctatgttgaccagtgggactgggaacgcgtaatgggcgacggtgagcgtcaattcagcactctgaaaagcacggtagaggcgatctgggcgggaattaaagcaaccgaagctgcggttagcgaagagtttggcctggcaccgttcctgccggatcagatccacttcgtacacagccaggagttactgtctcgttatccggatcttgatgccaaagggcgtgagcgggcgatagcgaaagatcttggcgcggtattccttgtcgggattggcggcaagctgagcgatggtcatcgccacgacgtgcgcgcaccggattatgatgactggagcaccccgagtgagctgggccatgcgggtctgaacggcgatattctggtgtggaacccggtactggaagatgcgtttgagctttcctccatggggatccgtgtagatgccgacacgctgaagcatcaactggcgctgaccggtgacgaagatcgcctggagctggagtggcatcaggcgctgctgcgcggtgaaatgccgcagaccatcggcggcggtatcggccagtctcgtttgactatgctgctgctgcaactgccgcatatcggccaggttcagtgtggagtatggccagctgctgttcgcgagagcgtcccttctctgctgtaataatttatcgccgccagcgtctgagcaggcggcttcgcatcccggtatcaaagcgccagatatgatcgaaaatgcgcatgatgccgggtttgccgtgtgcgctcatcgccacggcatgaaagcgatgctgatgtacccgctgcagctctttcactttactcgtcacgtcgtcaggcaaccgctgagcgataaaatcagaaatcaccaccgcatcggcatcaaaccattccctgctttgcaagcgttccataatggcgcgaaaacaactggcaagatcggtgccgccacgaaactgctggcttaaaaaacggattgcttgttcgatgccttgtgggccactaagctcataacggacgatctcggtggaaaatagcataatatagcagcgccggttttctgcgagagcaatgcgcatcaaggccaggcagaacgctttcgcacactgttcattaaagccgcccatactgccggaagtatccacacagacaataaacggcccgcgcggctgttcatcgtaatctttatgtaccaccggacgttcgatcactttttcacgccagctctcaccgtgcaggcgataggtgagcaactgtttttccaccagccgacggtaaaactcatactccagttccgttatccctagtgtcgccagttctggcggcaggagacgtaaaatatcatcgctttgttgcagaccatcaacctgctcaggaaccgtcgccggttcgcgcaccatggtgcggaaggtttccatctgcgcatcgttgcgcggtatacttttggcttcccgagaacgccccagctgctctgccaggcgtttcagttccggctgttcgttaagaaattcaccgtatttcacaatcaactgatagtcgccacgtttaagctgaccggcgctcatatcccacagacgaccagctgcagtattgttatctgcgagaatcggttcaagttgtccgctcagcgtcatgcgttcctgaacttcactcaacagttgttcgcgttcttcttctaatagctgttgatttaacgtcgttgcttgcacgatcagacttaaacgccaacgctggagaaaaagcgtgtgtaacgcactagtgatcgtgctgttagcatcaaccaactgtcgggcttgttctgcccatggagaattcagacgatgcagtaagtccaggatctgtggtagctgcacaataaactgtggcgtggagaggagctggctttgctgatagcacatcacctcttcggtgagttccggcgggactcgggcatctttcagccgactgcgcagcgcttcacgccagcggggaacatcatcagtgattgccgccttcaggcgtgggaatttttcaaagaagaccgccagctgcggactggccagcagtgcgatgatcatctcttcgatcaatccctcttcgctgacggccagcatcacattaagcgtatccagcgttagcattgttgtgcctggcgaatctgtgcaccgacatcctgtaggctggcttcaatgcgacctaaccagtcgccagggataaacagacatttttgctgttcgctgaataaagcgtgttgcttgcgccagtcgctttcaagctcttccagttgttgttttatttcaccaggcagaccttcagcgctactaccgggaagtgccagcgtactgccttgtaaacttacatcgcgaacgacaagatgttgggcgctatcaacttccagattcagtttctgggcaaagccgataccgttcagtttaccgcgaatttcaccacctttgctcagccactgttccagcgcgctacgctcaaaggagatatgaaccacttccatatcatgcagttttaacggtttttgcagcagtagagtcagagtggaagcagtaacgttaacaggaagttgatactgctgacgacggctgaaaatgccgcccagacgaattaccgttaaggctgttttatcgctttgttgctgctggagttgcaggtgacgttgcacaatcgcgccaaggcgagtcaacatcccttgctgttgccaggcgtgaccggtcatcaatacatcaatttgttgttgtatcaaattcaggctttgcgcgtcataccacaggcaatctttcagcaaaatgagatctaccggggcaacagcactgcgaccgctaaaaaaggcgctggcctgcaataatcggatcgcttttttccagcgacgatcgctgacataaggcgcatccggtaatttatccagttgctggcgcagcataaaaatcagctcaaatacatgatcgggcagcgtaatttcaccaatctctttctgccagcgttcatattcttcatctgtgacctgcaaggcatcaggaaccggattgtcgttttcatcctgttgactggtcagcatggagcggaaattcgctttatcctgcactttatctaaccacagacgaatcagcatgcggtcatataacgcttccagactgctgtctgcttccggcagctcgttggaggccgccaccagcagacgcatcgggattttttctacgtgtgcaccgttgcggaactggcgctcgttaatggcggtgagcaaggtattaagaattgccgggcccgctttccagatctcatccagaaagacaatttctgcttccggcaggtaaccgctggttaaacgttcatagcgcccttcatcttttagcgcctgaatagaaaggggaccaaaaacttcttccggcgtggagaagcgggtcatcagatattcaaacgcgcgggcattctgaaaggcgaattttaagcgccgggcgatcaaacttttggcaatacctggcgggccaaggaggaacacactttcaccacttaatgccgctaataaacacaagcggatggcgtggctacgttcataaagccccttttccaagctactgctcaggcgggaaattctttccgctaataaatgagggtgagccataatgaagtggcgtcctttcgtcaaaagttctgcgtaaattgcgagtatagacgtttcttgctggtggctaaaatagtctcaaagggggggtatttttctttgagccaggttaatgtggccgcatttaggagtacgattttgccgttaatcgtgcatactgtgcgcttttttgtgggccaagggactaagcacacatttcatatttcaacgaaagactagtctatgagcactgataataagcaaagtttgcccgcgattaccctcgcggcgattggagttgtctacggcgatattggtaccagcccgttatatacacttcgtgaatgtttgtccggccagtttggttttggcgttgaacgcgatgccgtgtttggctttttaagcctgatcttctggctgctaatctttgtggtttccattaaatatctcaccttcgtgatgcgggcagataacgccggtgagggggggatcctgacgttgatgagccttgccgggcgtaatacgagcgcgcgaaccacaagtatgctggtgattatggggctaatcggcggcagctttttttatggtgaagtcgtcataacacccgctattagcgtgatgagtgccattgaaggtctggaaatcgtcgccccgcagctggatacctggatagttcccctcagtattatcgttctcactttattatttatgattcaaaaacatggcacggctatggtcggtaagctgtttgcgccgatcatgctgacctggtttttgattctggcaggactggggttacgtagcattattgctaacccggaagtgctgcatgcgctgaatccaatgtgggcggtgcatttcttccttgaatacaaaacggtttcttttattgcattaggggcagtggtgttgagcattacgggggtcgaggcgctgtatgctgatatggggcactttggtaagttccctattcgcctggcgtggttcaccgtcgtattaccttccttgacccttaattacttcggtcagggagcgctgttgttaaagaacccggaagcgattaagaacccgttcttcctgttggcaccggactgggcgctgatcccgctgctgatcatcgccgcactggcgacggtaattgccagccaggcggttatctctggcgtcttcagtttgacgcgtcaggcggtacgtctgggatatttgagcccgatgcgcattattcacacctccgaaatggagagtgggcaaatctatattccgtttgtgaactggatgctctatgtcgcggtcgtgattgtgattgtcagctttgagcactccagcaacctggcggcggcgtacgggattgcggtgaccggaaccatggtgctgacgtctattctcagcactaccgtggcacgtcagaactggcactggaataagtattttgttgcgctgatcctgattgctttcctttgtgtcgatattccattgttcaccgctaacctcgataaactgctctccggcggctggttgccattgagcctcggtactgtgatgtttatcgtgatgaccacctggaagagcgagcgtttccgcttgctgcggcggatgcatgaacatggtaactctctggaagcgatgattgctagcctggagaaaagtccgcctgttcgcgtgcccgggaccgcggtgtatatgagccgtgcaatcaacgtcattccctttgcgctgatgcataaccttaaacataacaaggtattgcatgagcgggtgattctgttaactctgcgcaccgaagacgctccatatgtccataacgtccgtcgggtacagattgaacaactgagccccactttctggcgcgtggtggcaagttatggttggcgagaaacgccaaacgtagaagaagttttccaccgctgcggtctggaaggattaagttgccggatgatggaaacctccttctttatgagccatgagagcttgatcctcggcaaacgcccgtggtatttgcgtctgcgcggcaagctgtacttgctgctgcaacgtaatgcgctgcgtgcaccagatcaatttgaaatcccgccaaacagggttatcgaactgggtactcaggtcgaaatctaacgccagacgcctcctttcttcataagggggcgtttttgttttcatggttaatcaccatgtaaaacgtttcgaggttgatcacatttccgtaacgtcacgatggttttcccaactcagtcaggattaaactgtgggtcagcgaaacgtttcgctgatggagaaaaaaatgaaaaaaggcaccgttcttaattctgatattagtagcgtgatctcccgtctgggacataccgatacgctggtggtgtgtgatgctggtttacccatccccaaaagtacaacgcgtatcgatatggcattaacccagggtgtaccttcttttatgcaggtgctgggcgtcgtcacaaatgaaatgcaggtcgaggcggccattatcgcggaagagatcaaacaccataatccgcaactccacgaaacgttgctcactcaccttgagcagctgcaaaaacaccagggaaataccattgaaattcgttacaccacgcatgaacaattcaaacaacaaaccgcagaaagtcaggcggtaattcgcagcggagaatgttctccgtatgcgaatatcattctctgtgctggcgtgacgttctgaggccgtcatggaagcattacttcagcttaaaggcatcgataaagccttcccgggcgtaaaagccctcagcggcgcagcgttaaatgtctatccgggccgcgtgatggcgctggtgggcgaaaacggcgcgggtaaatccaccatgatgaaagtgcttactggcatctatactcgcgatgccggtacgcttttatggctggggaaagaaacgacatttaccgggccaaaatcttcccaggaagccgggattgggattatccatcaggaactgaacctgatcccgcagttgaccattgccgaaaacattttcctcggtcgtgagtttgttaatcgctttggcaaaattgactggaaaaccatgtatgccgaagcggataaattgctggctaaacttaacctgcgctttaaaagcgacaagctggtgggcgatctttccatcggtgaccagcaaatggttgaaatcgccaaagtgctgagctttgagagcaaagtcatcattatggatgaaccgaccgatgcgctgaccgataccgaaaccgaatccctgttccgcgtcatccgcgagctgaaaagccaaggccgcggtattgtctatatctcccaccgcatgaaagaaatcttcgagatttgcgatgacgttaccgtttttcgtgatgggcaatttattgctgagcgcgaagtggcaagtctgaccgaagatagcctgattgagatgatggtgggtcgcaagctggaagatcaatatccgcacctggacaaagcgccgggagatatccgcctgaaagtcgataatctctgcggacctggcgttaacgatgtctcttttactttacgcaaaggcgaaattcttggcgtctctggtttgatgggcgcaggtcgtaccgaactgatgaaagtgctctacggcgcactaccgcgcaccagcggttacgtcaccctggatgggcatgaagtcgttacccgtagtccgcaggatggcctggcaaacggcattgtgtatatctccgaagaccgtaaacgtgacggtttagtgttgggcatgagtgtaaaagagaacatgagcctgacagcgctgcgctacttcagccgcgctggcggcagtttgaagcatgccgatgaacagcaggctgtgagtgatttcattcgtctgtttaatgtgaaaactccgagcatggaacaggcaattggtctgctttccggtggcaatcagcaaaaagtggcgattgcccgcggtctgatgacacgccccaaagtgttgatccttgatgaacctacccgtggcgtagatgtcggcgcgaaaaaagagatctatcaactgattaaccagttcaaagccgatggcttgagcatcattctggtgagtagcgagatgccagaagtattaggcatgagcgatcgcatcatcgtcatgcatgaagggcatctcagcggggaatttactcgtgagcaggccacccaggaagtgttaatggctgccgctgtgggcaagcttaatcgcgtgaatcaggagtaaaaaaatgacaacccagactgtctctggtcgccgttatttcacgaaagcgtggctgatggagcagaaaagccttatcgctctgctggtgctgatcgcgattgtcagcacgttaagcccgaactttttcaccatcaataacttattcaatattctccagcaaaccagtgtgaacgccattatggcggtcgggatgacgctggtgatcctgacgagcggcatcgacttaagcgtaggttctctgttggcgctgaccggcgcagttgctgcatctatcgtcggcattgaagtcaatgcgctggtggctgtcgctgctgctctcgcgttaggtgccgcaattggtgcggtaaccggggtgattgtagcgaaaggtcgcgtccaggcgtttatcgctacgctggttatgatgcttttactgcgcggcgtgaccatggtttataccaacggtagcccagtgaataccggctttactgagaacgccgatctgtttggctggtttggtattggtcgtccgctgggcgtaccgacgccagtctggatcatggggattgtcttcctcgcggcctggtacatgctgcatcacacgcgtctggggcgttacatctacgcgctgggcggcaacgaagcggcaacgcgtctttctggtatcaacgtcaataaaatcaaaatcatcgtctattctctttgtggtctgctggcaagcctggccgggatcattgaagtggcgcgtctctcctccgcacaacccacggcggggactggctatgagctggatgctattgctgcggtggttctgggcggtacgagtctggcgggcggaaaaggtcgcattgttgggacgttgatcggcgcattaattcttggcttccttaataatggattgaatttgttaggtgtttcctcctattaccagatgatcgtcaaagcggtggtgattttgctggcggtgctggtagacaacaaaaagcagtaataacgactacaggacatcttgaatatgaacatgaaaaaactggctaccctggtttccgctgttgcgctaagcgccaccgtcagtgcgaatgcgatggcaaaagacaccatcgcgctggtggtctccacgcttaacaacccgttctttgtaagcctgaaagatggcgcgcagaaagaggcggataaacttggctataacctggtggtgctggactcccagaacaacccggcgaaagagctggcgaacgtgcaggacttaaccgttcgcggcacaaaaattctgctgattaacccgaccgactccgacgcagtgggtaatgctgtgaagatggctaaccaggcgaacatcccggttatcactcttgaccgccaggcaacgaaaggtgaagtggtgagccacattgcttctgataacgtactgggcggcaaaatcgctggtgattacatcgcgaagaaagcgggtgaaggtgccaaagttatcgagctgcaaggcattgctggtacatccgcagcccgtgaacgtggcgaaggcttccagcaggccgttgctgctcacaagtttaatgttcttgccagccagccagcagattttgatcgcattaaaggtttgaacgtaatgcagaacctgttgaccgctcatccggatgttcaggctgtattcgcgcagaatgatgaaatggcgctgggcgcgctgcgcgcactgcaaactgccggtaaaagcgatgtgatggtcgtcggatttgacggtacaccggatggcgaaaaagcggtgaatgatggcaaactagcagcgactatcgctcagctacccgatcagattggcgcgaaaggcgtcgaaaccgcagataaagtgctgaaaggcgagaaagttcaggctaagtatccggttgatctgaaactggttgttaagcagtaattttaatcaggttgtatgacctgatggtgacataaatacgtcatcgacagatgaacgtgtaatataaagaaaagcagggcacgcgccaccctaacacggtggcgcattttatggacatcccgaatatgcaaaacgcaggcagcctcgttgttcttggcagcattaatgctgaccacattcttaatcttcaatcttttcctactccaggcgaaaccgtaaccggtaaccactatcaggttgcatttggcggcaaaggcgcgaatcaggctgtggctgctgggcgtagcggtgcgaatatcgcgtttattgcctgtacgggtgatgacagcattggtgagagcgttcgccagcagctcgccactgataacattgatattactccggtcagcgtgatcaaaggcgaaagtacaggtgtggcgctgatttttgttaatggcgaaggtgagaatgtcatcggtattcatgccggcgctaatgctgccctttccccggcgctggtggaagcgcaacgtgagcgtattgccaacgcgagtgcattattaatgcagctggaaagtccactcgaaagtgtgatggcagcggcgaaaatcgcccatcaaaataagactatcgttgcgcttaacccggctccggctcgcgaacttcctgacgaactgctggcgctggtggacattattacgccaaacgaaacggaagcagaaaagctcaccggtattcgtgttgaaaatgatgaagatgcagcgaaggcggcgcaggtactgcatgaaaaaggtatccgtactgtactgattactttaggaagtcgtggtgtatgggctagcgtgaatggtgaaggtcagcgcgttcctggattccgggtgcaggctgtcgataccattgctgccggagatacctttaacggtgcgttaatcacggcattgctggaagaaaaaccattgccagaggcgattcgttttgcccatgctgccgctgcgattgccgtaacacgtaaaggcgcacaaccttccgtaccgtggcgtgaagagatcgacgcatttttagacaggcagaggtgacgcttggctacaatgaaagatgttgcccgcctggcgggcgtttctaccagtacagtttctcacgttatcaataaagatcgcttcgtcagtgaagcgattaccgccaaagttgaagcggcgattaaagaactcaattacgcgccaagtgctctggcgcgtagcctcaaactcaatcaaacacataccattggcatgttgatcactgccagtaccaatcctttctatagtgaactggtgcgtggcgttgaacgcagctgcttcgaacgcggttatagtctcgtcctttgcaataccgaaggcgatgaacagcggatgaatcgcaatctggaaacgctgatgcaaaaacgcgttgatggcttgctgttactgtgcaccgaaacgcatcaacctagccgtgaaatcatgcaacgttatccgacagtgcctactgtgatgatggactgggctccgttcgatggcgacagcgatcttattcaggataacagcttgctgggcggagacttagcaacgcaatatctgatcgataaaggtcatacccgtatcgcctgtattaccggcccgctggataaaactccggcgcgcctgcggttggaaggttatcgggcggcgatgaaacgtgcgggtctcaacattcctgatggctatgaagtcactggtgattttgaatttaacggcgggtttgacgctatgcgccaactgctaagtcatccgctgcgtcctcaggccgtctttaccggaaatgacgctatggctgttggcgtttaccaggcgttatatcaggcagagttacaggttccgcaggatatcgcggtgattggctatgacgatatcgaactggcaagctttatgacgccaccattaaccactatccaccaaccgaaagatgaactgggggagctggcgattgatgtactcatccatcggataacccagccgacccttcagcaacaacgattacaacttactccgattctgatggaacgcggtagcgcttaattactcgctttcacttggaacgcggttcggcttagatttacgctgtcttttgatcaaattattaccatcggttgttttcagaagcatgaacattgctgcactagcaacagtaataatgcccattgtgataaacgtatagtggaattgttcgacagtcgttgtgccttccattccttcataaacgcgaaggacggccgcacttacagcaacgcctaaactaatgctcagttgctgcgtgaccgccagaacactgttaccgctgctggcattgtcatcggtcagatcggcaagtgtgatggtattcatcgcggtaaactgcgtgctcatagccatccctaatataaacaacggcaagatcagcatccatatagccattgctggactttgcaaagagaactgagcgatcattagcccaataatcaccgtgatccccactaacgtatggcgatagcccagacgacgtaagacttgggtaaccatgctttttgcaataatggaacctaacgctgtcggtgccatcatacagccagcaataaacgcctgataaccaaatcctacctgtaacatcaatggcataaggaacggtacacagccggtccccagacgggttgcaatattgcctacgataccgatgctgaaagtgcgggttttaaataaatctaaactaattaatgggtttggcgtgcgtcgtgcatggagaatatagagaagcagtaacccgatgctggtgacaattaccgtcaaggcaatccagctggcgacaatcttttccccgaatagctctattccgctactgaagagaacaaggctgaggccaaacagcaaaaagccagtgatatcgaatctgcgtcgtgcggtggtgaaattgggcatatgtttgcgcgcgtaaagaaggcccgcaatacctatggggatattgattaaaaatatccagtgccaggttgcccaggtgaccagcacgccgccaagaacggggcctaaaattggccccaccagacccggcatggcgacaaaattcaatactggaagaagttcattacgaggataagcgcgcagtaaggccagccgagcaacaggcatcatcattgcgccgcctatcccctgaataacccggaagacaaccagctgtggtaggctattagaaagtgcgcaggccagagaacccaatgtgaacagactcacggcaagggtaaaaatgcgacgcgtaccgaagcgatcggctagccatccgcttaccggaataagcatcgccaccgtcagcgtataactgatgatggcactttgcatcgcgagaggagaacgattaaggctatgagcgattgcgggtaaggcggtattaagaatagtggcatcaagtgcctgcatgaagaaggccatcgccgcgatccacggcaaacccgccatactgcgcttctttttatcgctcattcaatgtcctgttatcgggttatcacttatcaggactgcgtagcagcgcctgacaagctttaaatgccgcgtcgccatcgctttggataatcgcatcgacaatcgcctgatgcagatccagctttatcactgtgtcgctggtaatactcgtgaagtaagtgtgataaacgctatggaataggctggcgaaactggtcaaaaacggattggcgctcatttcatagatatgctcatgccaggccatatcgacttcgatccagcgttcacggcgaaagttctcttttaatgccgccatttcggccattaacgtattgagatgcgctttctgttccgcggtgccaaccgttgctgccagtaggcaggcttgcggctccagacagatacgcataaccagaaagtgatcgatgacctgatgaaagttctcttctgtcatccaccaggtaagcaattcctgatcaagaaaattccagttgctttgtggcatgacccgagtaccaattcgcggtcgcggtaaaaccatcccttttgccgttaacgttttgaccgcttcgcgtaccgctgtacgactcactccaaattgctcgcccagctcaatctcaccgggcaaaatggtgccgggttcatattcaccttttaagatccgttgcgccagcttctcagccagaacatagctaaggtttttctgtgcagctaactgttgtgcgcttaaaggcattacttatcttcctttttctttttattcctccttagtatgccaccaggaagtgtgattacggttgcaaaaacggcaaattgcttgttttatggcacattaacggggcttttgctgaaaaaatgcgcggtcagaaaattattttaaatttcctcttgtcaggccggaataactccctataatgcgccaccactgacacggaacaacggcaaacacgccgccgggtcagcggggttctcctgagaactccggcagagaaagcaaaaataaatgcttgactctgtagcgggaaggcgtattatgcacaccccgcgccgctgagaaaaagcgaagcggcactgctctttaacaatttatcagacaatctgtgtgggcactcgaagatacggattcttaacgtcgcaagacgaaaaatgaataccaagtctcaagagtgaacacgtaattcattacgaagtttaattctttgagcgtcaaacttttaaattgaagagtttgatcatggctcagattgaacgctggcggcaggcctaacacatgcaagtcgaacggtaacaggaagaagcttgcttctttgctgacgagtggcggacgggtgagtaatgtctgggaaactgcctgatggagggggataactactggaaacggtagctaataccgcataacgtcgcaagaccaaagagggggaccttcgggcctcttgccatcggatgtgcccagatgggattagctagtaggtggggtaacggctcacctaggcgacgatccctagctggtctgagaggatgaccagccacactggaactgagacacggtccagactcctacgggaggcagcagtggggaatattgcacaatgggcgcaagcctgatgcagccatgccgcgtgtatgaagaaggccttcgggttgtaaagtactttcagcggggaggaagggagtaaagttaatacctttgctcattgacgttacccgcagaagaagcaccggctaactccgtgccagcagccgcggtaatacggagggtgcaagcgttaatcggaattactgggcgtaaagcgcacgcaggcggtttgttaagtcagatgtgaaatccccgggctcaacctgggaactgcatctgatactggcaagcttgagtctcgtagaggggggtagaattccaggtgtagcggtgaaatgcgtagagatctggaggaataccggtggcgaaggcggccccctggacgaagactgacgctcaggtgcgaaagcgtggggagcaaacaggattagataccctggtagtccacgccgtaaacgatgtcgacttggaggttgtgcccttgaggcgtggcttccggagctaacgcgttaagtcgaccgcctggggagtacggccgcaaggttaaaactcaaatgaattgacgggggcccgcacaagcggtggagcatgtggtttaattcgatgcaacgcgaagaaccttacctggtcttgacatccacggaagttttcagagatgagaatgtgccttcgggaaccgtgagacaggtgctgcatggctgtcgtcagctcgtgttgtgaaatgttgggttaagtcccgcaacgagcgcaacccttatcctttgttgccagcggtccggccgggaactcaaaggagactgccagtgataaactggaggaaggtggggatgacgtcaagtcatcatggcccttacgaccagggctacacacgtgctacaatggcgcatacaaagagaagcgacctcgcgagagcaagcggacctcataaagtgcgtcgtagtccggattggagtctgcaactcgactccatgaagtcggaatcgctagtaatcgtggatcagaatgccacggtgaatacgttcccgggccttgtacacaccgcccgtcacaccatgggagtgggttgcaaaagaagtaggtagcttaaccttcgggagggcgcttaccactttgtgattcatgactggggtgaagtcgtaacaaggtaaccgtaggggaacctgcggttggatcacctccttaccttaaagaagcgtactttgtagtgctcacacagattgtctgatagaaagtgaaaagcaaggcgtttacgcgttgggagtgaggctgaagagaataaggccgttcgctttctattaatgaaagctcaccctacacgaaaatatcacgcaacgcgtgataagcaattttcgtgtccccttcgtctagaggcccaggacaccgccctttcacggcggtaacaggggttcgaatcccctaggggacgccacttgctggtttgtgagtgaaagtcgccgaccttaatatctcaaaactcatcttcgggtgatgtttgagatatttgctctttaaaaatctggatcaagctgaaaattgaaacactgaacaacgaaagttgttcgtgagtctctcaaattttcgcaacacgatgatgaatcgaaagaaacatcttcgggttgtgaggttaagcgactaagcgtacacggtggatgccctggcagtcagaggcgatgaaggacgtgctaatctgcgataagcgtcggtaaggtgatatgaaccgttataaccggcgatttccgaatggggaaacccagtgtgtttcgacacactatcattaactgaatccataggttaatgaggcgaaccgggggaactgaaacatctaagtaccccgaggaaaagaaatcaaccgagattcccccagtagcggcgagcgaacggggagcagcccagagcctgaatcagtatgtgtgttagtggaagcgtctggaaaggcgcgcgatacagggtgacagccccgtacacaaaaatgcacatattgtgagctcgatgagtagggcgggacacgtggtatcctgtctgaatatggggggaccatcctccaaggctaaatactcctgactgaccgatagtgaaccagtaccgtgagggaaaggcgaaaagaaccccggcgaggggagtgaaaaagaacctgaaaccgtgtacgtacaagcagtgggagcacgcttaggcgtgtgactgcgtaccttttgtataatgggtcagcgacttatattctgtagcaaggttaaccgaataggggagccgaagggaaaccgagtcttaactgggcgttaagttgcagggtatagacccgaaacccggtgatctagccatgggcaggttgaaggttgggtaacactaactggaggaccgaaccgactaatgttgaaaaattagcggatgacttgtggctgggggtgaaaggccaatcaaaccgggagatagctggttctccccgaaagctatttaggtagcgcctcgtgaattcatctccgggggtagagcactgtttcggcaagggggtcatcccgacttaccaacccgatgcaaactgcgaataccggagaatgttatcacgggagacacacggcgggtgctaacgtccgtcgtgaagagggaaacaacccagaccgccagctaaggtcccaaagtcatggttaagtgggaaacgatgtgggaaggcccagacagccaggatgttggcttagaagcagccatcatttaaagaaagcgtaatagctcactggtcgagtcggcctgcgcggaagatgtaacggggctaaaccatgcaccgaagctgcggcagcgacgcttatgcgttgttgggtaggggagcgttctgtaagcctgcgaaggtgtgctgtgaggcatgctggaggtatcagaagtgcgaatgctgacataagtaacgataaagcgggtgaaaagcccgctcgccggaagaccaagggttcctgtccaacgttaatcggggcagggtgagtcgacccctaaggcgaggccgaaaggcgtagtcgatgggaaacaggttaatattcctgtacttggtgttactgcgaaggggggacggagaaggctatgttggccgggcgacggttgtcccggtttaagcgtgtaggctggttttccaggcaaatccggaaaatcaaggctgaggcgtgatgacgaggcactacggtgctgaagcaacaaatgccctgcttccaggaaaagcctctaagcatcaggtaacatcaaatcgtaccccaaaccgacacaggtggtcaggtagagaataccaaggcgcttgagagaactcgggtgaaggaactaggcaaaatggtgccgtaacttcgggagaaggcacgctgatatgtaggtgaagcgacttgctcgtggagctgaaatcagtcgaagataccagctggctgcaactgtttattaaaaacacagcactgtgcaaacacgaaagtggacgtatacggtgtgacgcctgcccggtgccggaaggttaattgatggggtcagcgcaagcgaagctcttgatcgaagccccggtaaacggcggccgtaactataacggtcctaaggtagcgaaattccttgtcgggtaagttccgacctgcacgaatggcgtaatgatggccaggctgtctccacccgagactcagtgaaattgaactcgctgtgaagatgcagtgtacccgcggcaagacggaaagaccccgtgaacctttactatagcttgacactgaacattgagccttgatgtgtaggataggtgggaggctttgaagtgtggacgccagtctgcatggagccgaccttgaaataccaccctttaatgtttgatgttctaacgtggacccgtgatccgggttgcggacagtgtctggtgggtagtttgactggggcggtctcctcctaaagagtaacggaggagcacgaaggttggctaatcctggtcggacatcaggaggttagtgcaatggcataagccagcttgactgcgagcgtgacggcgcgagcaggtgcgaaagcaggtcatagtgatccggtggttctgaatggaagggccatcgctcaacggataaaaggtactccggggataacaggctgataccgcccaagagttcatatcgacggcggtgtttggcacctcgatgtcggctcatcacatcctggagctgaagtaggtcccaagggtatggctgttcgccatttaaagtggtacgcgagctgggtttagaacgtcgtgagacagttcggtccctatctgccgtgggcgctggagaactgaggggggctgctcctagtacgagaggaccggagtggacgcatcactggtgttcgggttgtcatgccaatggcactgcccggtagctaaatgcggaagagataagtgctgaaagcatctaagcacgaaacttgccccgagatgagttctccctgactccttgagagtcctgaaggaacgttgaagacgacgacgttgataggccgggtgtgtaagcgcagcgatgcgttgagctaaccggtactaatgaaccgtgaggcttaaccttacaacgccgaagctgttttggcggatgagagaagattttcagcctgatacagattaaatcagaacgcagaagcggtctgataaaacagaatttgcctggcggccgtagcgcggtggtcccacctgaccccatgccgaactcagaagtgaaacgccgtagcgccgatggtagtgtggggtctccccatgcgagagtagggaactgccaggcatcaaattaagcagtaagccggtcataaaaccggtggttgtaaaagaattcggtggagcggtagttcagtcggttagaatacctgcctgtcacgcagggggtcgcgggttcgagtcccgtccgttccgccaccctaattaggggcgtagttcaattggtagagcaccggtctccaaaaccgggtgttgggagttcgagtctctccgcccctgccagaaatcatccttagcgaaagctaaggattttttttatctgaaataaccctctccgaagtaaatccttctaccggcatccttgccagccattcatattaatacacttcatccagcacgttaattttcaaaagatcgcgaatcaacgcatttttatcgctattttgcagccatatggcataaagcggccgactaagtgttgtgctatcgacaacggtatgcaggccgccttttttacgcgcccagctgacgggtagccaggtgcaaccattaagcatcgcaatctgttgctgtgccagttcagcagaactggttgtcagaatgggcacttcgtcagcaccgatcaaacctgcctcatgctgttgaaaatctggcccccactcaagtcgcagataattaagatctccctttagtttactaggggcactggtataaagcgctaaagtgaaatatcccagcaactgactactaaattcgtccattttgggcgcttcagtggtaataagaagatcaagctggcgttcatgcagctgttttaccagagactgccgttgggcaattcgcgcttcgaactgtaagcctgtatgggcatcctgattttgatacaagcgtcccagccactgattaagcatacattcccacaagctggcgctggcaccgatagaaaactcgttatgtcgactggtatgcgccacctccttacgggcggcctgccaggtgctcatgagcgtttctgcataaggcagtagtttttcaccggcagcggttaaacggatattgtttctgtggcgggtgaaaaggttcacacccagttgattttccagttgtctgattcgaaagctcactgcactctgggtcagatagaggctttcagccgctcgaccaaagtgacgcgttcggctaacttccaggaaagtttttaacaattccgtatccacagtgctctccgcaaaattatttgtcgttatgatttaaatgttttgttttacactctgtcaagcgtaactaatactccgcgccataactagctcggtcaaagaattaggagcgtgcaggatggcggaaagctttacgacgactaatcgatatttcgacaataaacattatccacgtggattctctcgtcatggtgatttcaccatcaaagaggcacaactgcttgagcgtcatggttatgccttcaatgagttggatcttggcaaacgcgagccggttaccgaggaagagaaactcttcgtagcagtatgccgtggcgaacgtgagccagtgacagaagcagaacgcgtgtggtccaagtatatgacgcgtattaagcgtccaaaacgttttcacaccctttccggcggtaaaccgcaggttgaaggtgctgaagactacaccgattctgacgattaataaaaagggcgaaatgccctttttttatgtcagtagtttctgcagatggatgagcaaacggtcaatcgctcgatagctaactgcctcctgcaaatgctgacgtgtgataatgtcagactgatcaatatcagcaatggttcgtgcaactttcaataaccgctgccaggcacgaatgcttaaccccagatggatcagtgttccttccaaccacatcgcatcttcgctctcaagtttgcagaattggcgtatttccggactatccagccaggcattcagtttattctgccgcttaaattggcgctctctggcggccattacgcgttgtttaacggtggcgctgctttctcccggcactaccgttttactcaaaatgccggggggtggtaatgggatctccagactgagatcgaagcggtcgagaaagggcccgctgagccggttgagataacgtaatgtctgttctggcgtgcagcggttatggtttccctgataatgtccggtagggctgggattcatcgccgcaacaagctggaaacgggctggataggttatttttgctcgtgtgcgactaagatggatctgcccggattcaatcggctctcgcaaggcatccagtgtacgccgttcaaattcaggtagctcatcaagaaaaagcacgccgttatgcgccaggctaatttcaccgggccctggaattgcgccaccgcctaccatcgcagttaagcttgcactgtgatgaggactgcggaacgggcgctgccgccattgtttttgtacactttcagcatttaccagacttaatatcgcagcactctccagtgcctcttcattgcttaaatctggcaacaggccattaatacggctggcgagcattgttttacctgttcccggcggcccaatcagtaaaaggttgtgcccgccagcagcggtaatttccagtcctcgctttccttgttcctgaccgataacatcactgagatcatgttgtagcgcccgggatactgcatcagttggtttcgggcgttcgagagcgtgcttaccttccagaaacgcacagacagcttgcagatgatcggctatcaggcatccttcaccgttaattagccccacttcatcttcgttatctttcgcgacgataatttttctgccgctcttaatagcttcagttgcactggagattgcgccgggaacgccacgcagagcgcctgtaagcgccagttctccgactaattcatattcatctaacttattggctgtaagctgttcactggccgccagcaacgcaatggcgataggtaaatcatatcgtcccccttcttttggcagatcagctggagccaggttgatggtgatttttttcgccggatattcatatccgctattgataatggcgctgcgcacgcgatcgcgagcttcttttaccgttgtttctggtaagcccaccatcgttaagccgggtagacctttactgatatgtacctcaacagtgatcgggggcgcatttactcccagggctgcgcgggtatgaacaatactcagactcataagccctccttgagtcaccattatgtgcataagatatcgctgctgtagcccgctaattcgtgaattttagtggctgattcctgtttatttgtgcaagtgaagttgagttgttctggcggtggaatgatgctcgcaaaaatgcagcggacaaaggatgaactacgaggaagggaacaacattcatactgaaattgaatttttttcactcactattttatttttaaaaaacaacaatttatattgaaattattaaacgcatcataaaaatcggccaaaaaatatcttgtactatttacaaaacctatggtaactctttaggcattccttcgaacaagatgcaagaaaagacaaaatgacagcccttctacgagtgattagcctggtcgtgattagcgtggtggtgattattatcccaccgtgcggggctgcacttggacgaggaaaggcttaaagatcaagccttaacgaactaagacccccgcaccgaaaggtccgggggttttttttgaccttaaaaacataaccgaggagcagacaatgaataacagcacaaaattctgtttctcaagattcaggacggggaactaactatgaatggcgcacagtgggtggtacatgcgttgcgggcacagggtgtgaacaccgttttcggttatccgggtggcgcaattatgccggtttacgatgcattgtatgacggcggcgtggagcacttgctatgccgacatgagcagggtgcggcaatggcggctatcggttatgctcgtgctaccggcaaaactggcgtatgtatcgccacgtctggtccgggcgcaaccaacctgataaccgggcttgcggacgcactgttagattccatccctgttgttgccatcaccggtcaagtgtccgcaccgtttatcggcactgacgcatttcaggaagtggatgtcctgggattgtcgttagcctgtaccaagcacagctttctggtgcagtcgctggaagagttgccgcgcatcatggctgaagcattcgacgttgcctgctcaggtcgtcctggtccggttctggtcgatatcccaaaagatatccagttagccagcggtgacctggaaccgtggttcaccaccgttgaaaacgaagtgactttcccacatgccgaagttgagcaagcgcgccagatgctggcaaaagcgcaaaaaccgatgctgtacgttggcggtggcgtgggtatggcgcaggcagttccggctttgcgtgaatttctcgctgccacaaaaatgcctgccacctgtacgctgaaagggctgggcgcagtagaagcagattatccgtactatctgggcatgctggggatgcacggcaccaaagcggcaaacttcgcggtgcaggagtgtgacctgctgatcgccgtgggcgcacgttttgatgaccgggtgaccggcaaactgaacaccttcgcgccacacgccagtgttatccatatggatatcgacccggcagaaatgaacaagctgcgtcaggcacatgtggcattacaaggtgatttaaatgctctgttaccagcattacagcagccgttaaatcaatgactggcagcaacactgcgcgcagctgcgtgatgaacattcctggcgttacgaccatcccggtgacgctatctacgcgccgttgttgttaaaacaactgtcggatcgtaaacctgcggattgcgtcgtgaccacagatgtggggcagcaccagatgtgggctgcgcagcacatcgcccacactcgcccggaaaatttcatcacctccagcggtttaggtaccatgggttttggtttaccggcggcggttggcgcacaagtcgcgcgaccgaacgataccgttgtctgtatctccggtgacggctctttcatgatgaatgtgcaagagctgggcaccgtaaaacgcaagcagttaccgttgaaaatcgtcttactcgataaccaacggttagggatggttcgacaatggcagcaactgttttttcaggaacgatacagcgaaaccacccttactgataaccccgatttcctcatgttagccagcgccttcggcatccatggccaacacatcacccggaaagaccaggttgaagcggcactcgacaccatgctgaacagtgatgggccatacctgcttcatgtctcaatcgacgaacttgagaacgtctggccgctggtgccgcctggcgccagtaattcagaaatgttggagaaattatcatgatgcaacatcaggtcaatgtaagcgctcgcttcaatccagaaaccttagaacgtgttttacgcgtggtgcgtcatcgtggtttccacgtctgcagtatgaatatggccgccgccagcgatgcacaaaatataaatatcgaattgaccgttgccagcccacggagcgtcgacttactgtttagtcagttaaataaactggtggacgtcgcacacgttgccatctgccagagcacaaccacaagtcaacaaatccgcgcctgagcgcaaaaggaatataaaaatgaccacgaagaaagctgattacatttggttcaatggggagatggttcgctgggaagacgcgaaggtgcatgtgatgagccacgcgctgcactatggcactagcgtttttgaaggcatccgttgctacgacagccacaaaggaccggttgtattccgccatcgtgagcatatgcagcgtctgcatgactccgccaaaatctatcgcttcccggttagccagagcattgatgagctgatggaagcttgtcgtgacgtgatccgcaaaaacaatctcaccagcgcctatatccgtccgctgatcttcgtcggtgatgttggcatgggagtaaacccgccagcgggatacagtaccgacgtgattatcgctgctttcccgtggggagcgtatctgggcgcagaagcgctggagcaggggatcgatgcgatggtttcctcctggaaccgcgcagcaccaaacaccatcccgacggcggcaaaagccggtggtaactacctctcttccctgctggtgggtagcgaagcgcgccgccacggttatcaggaaggtatcgcgctggatgtgaacggttatatctctgaaggcgcaggcgaaaacctgtttgaagtgaaagatggtgtgctgttcaccccaccgttcacctcctccgcgctgccgggtattacccgtgatgccatcatcaaactggcgaaagagctgggaattgaagtacgtgagcaggtgctgagccgcgaatccctgtacctggcggatgaagtgtttatgtccggtacggcggcagaaatcacgccagtgcgcagcgtagacggtattcaggttggcgaaggccgttgtggcccggttaccaaacgcattcagcaagccttcttcggcctcttcactggcgaaaccgaagataaatggggctggttagatcaagttaatcaataaatacaaaaaatgggacggcacgcaccgtcccatttacgagacagacactgggagtaaataaagtatgcctaagtaccgttccgccaccaccactcatggtcgtaatatggcgggtgctcgtgcgctgtggcgcgccaccggaatgaccgacgccgatttcggtaagccgattatcgcggttgtgaacagcttcacccaatttgtaccgggtcacgtccatctgcgcgatctcggtaaactggtcgccgaacaaattgaagcggctggcggcgttgccaaagagttcaacaccattgcggtggatgatgggattgccatgggccacggggggatgctttatagtctgccatctcgcgaactgatcgctgattccgttgagtatatggtcaacgcccactgcgccgacgccatggtctgcatctctaactgcgacaaaatcaccccggggatgctgatggcttccctgcgcctgaatattccggtgatctttgtttccggcggcccgatggaggccgggaaaaccaaactttccgatcagatcatcaagctcgatctggttgatgcgatgatccagggcgcagacccgaaagtatctgactcccagagcgatcaggttgaacgttccgcgtgtccgacctgcggttcctgctccgggatgtttaccgctaacagtatgaactgcctgaccgaagcgctgggcctgagccagccgggcaacggcagcctgctggcaacccacgccgaccgtaagcagctgttccttaatgctggtaaacgcattgttgaattgaccaaacgttattacgagcaaaacgacgaaagtgcactgccgcgtaatatcgccagtaaggcggcgtttgaaaacgccatgacgctggatatcgcgatgggtggaagcactaacaccgtacttcacctgctggcggcggcgcaggaagcggaaatcgacttcaccatgagtgatatcgataagctttcccgcaaggttccacagctgtgtaaagttgcgccgagcacccagaaataccatatggaagatgttcaccgtgctggtggtgttatcggtattctcggcgaactggatcgcgcggggttactgaaccgtgatgtgaaaaacgtacttggcctgacgttgccgcaaacgctggaacaatacgacgttatgctgacccaggatgacgcggtaaaaaatatgttccgcgcaggtcctgcaggcattcgtaccacacaggcattcagccaagattgccgttgggatacgctggacgacgatcgcgccaatggctgtatccgcagcctggaacacgcctacagcaaagacggcggcctggcggtgctctacggtaactttgcggaaaacggctgcatcgtgaaaacggcaggcgtcgatgacagcatcctcaaattcaccggcccggcgaaagtgtacgaaagccaggacgatgcggtagaagcgattctcggcggtaaagttgtcgccggagatgtggtagtaattcgctatgaaggcccgaaaggcggtccggggatgcaggaaatgctctacccaaccagcttcctgaaaagtatgggtctcggcaaagcctgtgcgctgatcaccgacggtcgtttctctggtggcacctctggtctttccatcggccacgtcagtccggaagcggcaagcggcggcagcattggcctgattgaagatggtgacctgatcgctatcgacatcccgaaccgtggcattcagttacaggtaagcgatgccgaactggcggcgcgtcgtgaagcgcaggacgctcgaggtgacaaagcctggacgccgaaaaatcgtgaacgtcaggtctcctttgccctgcgtgcttatgccagcctggcaaccagcgccgacaaaggcgcggtgcgcgataaaagcaaactggggggttaataatggctgacagccaacccctgtccggtgctccggaaggtgccgaatatttaagagcagtgctgcgcgcgccggtttacgaggcggcgcaggttacgccgctacaaaaaatggaaaaactgagcagccgtcttgataacgtcattctggtgaagcgcgaagatcgccagccagtgcacagctttaagctgcgcggcgcatacgccatgatggcgggcctgacggaagaacagaaagcgcacggcgtgatcactgcttctgcgggtaaccacgcgcagggcgtcgcgttttcttctgcgcggttaggcgtgaaggccctgatcgttatgccaaccgccaccgccgacatcaaagtcgacgcggtgcgcggcttcggcggcgaagtgctgctccacggcgcgaactttgatgaagcgaaagccaaagcgatcgaactgagtcagcagcaggggttcacctgggtgccgccgttcgaccatccgatggtgattgccgggcaaggcacgctggcgctggaactgctccagcaggacgcccatctcgaccgcgtatttgtgccagtcggcggcggcggtctggctgctggcgtggcggtgctgatcaaacaactgatgccgcaaatcaaagtgatcgccgtagaagcggaagactccgcctgcctgaaagcagcgctggatgcgggtcatccggttgatctgccgcgcgtagggctatttgctgaaggcgtagcggtaaaacgcatcggtgacgaaaccttccgtttatgccaggagtatctcgacgacatcatcaccgtcgatagcgatgcgatctgtgcggcgatgaaggatttattcgaagatgtgcgcgcggtggcggaaccctctggcgcgctggcgctggcgggaatgaaaaaatatatcgccctgcacaacattcgcggcgaacggctggcgcatattctttccggtgccaacgtgaacttccacggcctgcgctacgtcagtgaacgctgcgaactgggcgaacagcgtgaagcgttgttggcggtgaccattccggaagaaaaaggcagcttcctcaaattctgccaactgcttggcgggcgtagcgtcaccgagttcaactaccgttttgccgatgccaaaaacgcctgcatctttgtcggtgtgcgcctgagccgcggcctcgaagagcgcaaagaaattttgcagatgctcaacgacggcggctacagcgtggttgatctctccgacgacgaaatggcgaagctacacgtgcgctatatggtcggcggacgtccaagccatccgttgcaggaacgcctctacagcttcgaattcccggaaagtccgggcgcgctgctgcgcttcctcaacacgctgggtacgtactggaacatttctttgttccactatcgcagccatggcaccgactacgggcgcgtactggcggcgttcgaacttggcgaccatgaaccggatttcgaaacccggctgaatgagctgggctacgattgccacgacgaaaccaataacccggcgttcaggttctttttggcgggttaaggaaaaatgcctgatagcgcttcgcttatcaggcctacccgcgcgacaacgtcatttgtggttcggcaaaatcttccagaatgcctcaattagcggctcatgtagccgctttttctgcgcacacacgcccagctcaaacggcgttttctcatcgctgcgctctaaaatcatcacgcggttacgcaccggttcggggctgttttccagcaccacttccggcaacaatgccacgccacagccgagtgccaccatgcttaccatcgcttcatgcccgccaaccgtggcgtaaatcatcgggttactgattttattgcgtcgaaaccacagttcaatgcggcggcgtaccggcccctgatcggccataataaacggcaccgtactccagtccggcttctctacgctcacctgattacgcaccgggcagggcagcgcgggggcaatcagcactactgccagattctccagcatgctaaacgccactgcgccgggcaaggtttccggtttacccgcaatcgccagatccgcttcaccagtgaccaccttttccatcgcatctgccgcatcaccagtagtaagtttaatctccacgctcgggtgttccgcgcggaagcgatccagaatcggcggcagatggctgtaggcagcggtcacgctgcagaagatatgtaattcgccagagaggctcggcccttgctgatcgatggtgtggcgcaactgctgatactgcaacagcgtttgctgggcgaaaacgcgcagctcttcgcccgcttcagtcagcgtcaccgtgcggttatcgcgcacaaacagcggctgaccgagatcttcttccaggcgctgaatctgccgactgagcgtggatgggctaacgtgcatcgcccgcgcgctgcggccaaaatggcggctttccgccagatgcaggaaggttttcagatcgcgtaaatccacagggacagccctcgatgttgacgttgcaaaaattgcaatgtgacgttgtgaatatatcaatttccgcaataaatttcctgtcatatagtgaattcaatctcgcaaacgcgaaccgaacaataagaagcacaacatcacgaggaatcaccatggctaactacttcaatacactgaatctgcgccagcagctggcacagctgggcaaatgtcgctttatgggccgcgatgaattcgccgatggcgcgagctaccttcagggtaaaaaagtagtcatcgtcggctgtggcgcacagggtctgaaccagggcctgaacatgcgtgattctggtctcgatatctcctacgctctgcgtaaagaagcgattgccgagaagcgcgcgtcctggcgtaaagcgaccgaaaatggttttaaagtgggtacttacgaagaactgatcccacaggcggatctggtgattaacctgacgccggacaagcagcactctgatgtagtgcgcaccgtacagccactgatgaaagacggcgcggcgctgggctacagccacggtttcaacatcgtcgaagtgggcgagcagatccgtaaagatatcaccgtagtgatggttgcgccgaaatgcccaggcaccgaagtgcgtgaagagtacaaacgtgggttcggcgtaccgacgctgattgccgttcacccggaaaacgatccgaaaggcgaaggcatggcgattgccaaagcctgggcggctgcaaccggtggtcaccgtgcgggtgtgctggaaagctccttcgttgcggaagtgaaatctgacctgatgggcgagcaaaccatcctgtgcggtatgttgcaggctggctctctgctgtgcttcgacaagctggtggaagaaggtaccgatccagcatacgcagaaaaactgattcagttcggttgggaaaccatcaccgaagcactgaaacagggcggcatcaccctgatgatggaccgtctctctaacccggcgaaactgcgtgcttatgcgctttctgaacagctgaaagagatcatggcacccctgttccagaaacatatggacgacatcatctccggcgaattctcttccggtatgatggcggactgggccaacgatgataagaaactgctgacctggcgtgaagagaccggcaaaaccgcgtttgaaaccgcgccgcagtatgaaggcaaaatcggcgagcaggagtacttcgataaaggcgtactgatgattgcgatggtgaaagcgggcgttgaactggcgttcgaaaccatggtcgattccggcatcattgaagagtctgcatattatgaaagtctgcacgagctgccgctgattgccaacaccatcgcccgtaagcgtctgtacgaaatgaacgtggttatctctgataccgctgagtacggtaactatctgttctcttacgcttgtgtgccgttgctgaaaccgtttatggcagagctgcaaccgggcgacctgggtaaagctattccggaaggcgcggtagataacgggcaactgcgtgatgtgaacgaagcgattcgcagccatgcgattgagcaggtaggtaagaaactgcgcggctatatgacagatatgaaacgtattgctgttgcgggttaagtgcgcgctgatgccctcaccccgaccctctcccacagggagagggagaaaacactcaaggccttctcctggagaaggccttgctattagttgcggtacagcaccttaatgatgtgatatccgaactgggtgtgcagcgggccggtcggctccagtaccggacaagagaaaaccactttatcgaacgccggaaccatctgaccctggcggaattcacctaaatcaccgccgcgtttgccacttgggcaaatggagtgtttcttcgccagcttgccgaaatcggccccgttcttaatctgctcgagaagatccagagccagtttctcttcttttacaaggatatgcagtgctgctgctgtttttgccatgatcgtgccttgagtgaataattgtcaggcggcgattttagcatgatccgcagatgctaacgtaattgtcagtcagggagtggctggtacatatatggcaaaagcccggaaaatccgggcttcgcaggtccctcaaggggagaaaacttagggcctctatgggctacaaagtcattatcggggatggttattttattgtcaatttatgaggcttatggcattgatactcttgatgaccgccctctgtatgtctgcaaccaactcatgtggcaaacattgattaagataccctctgtaagtccttgctctgtttaatctgtttcgactgacttgttgtaccaggtcggctttggcccaacgaatctgctgatcaaagaattgcaggtcattgataacattactggctatttcaacatgcattccacgttttaacttgtctggtcggctgtggttgataatggaacgacgatgcatgcgttgccattaatttttccgttgagcacgacaactaacctgttttttatcatttcaggaggaatgcggccatcgtaatacgtcgtgctgaacggtccattttggctaacaggatagttaccaaagttgcattccagtatttcaccaaccttagggctgaaattaatcgccacgagtaaacctctccttagtaaactctgaaaaagtaataacacaacgttacgacccgatattttctaagtctaatggattcacgatgaactccgatttcggtcttctctctctgatttaaacatccgcagccaaccggttagcggcttacacgcggtcacattcaaatgcgattctgctacaatcctccccccgttcgaagattgagcaatacacctatgcgtctaaaccccggccaacaacaagctgtcgaattcgttaccggcccctgcctggtgctggcgggcgcgggttccggtaaaactcgtgttatcaccaataaaatcgcccatctgatccgcggttgcggttatcaggcgcggcacattgcggcggtgacctttactaataaagcagcgcgcgagatgaaagagcgtgtagggcagacgctggggcgcaaagaggcgcgtgggctgatgatctccactttccatacgttggggctggatatcatcaaacgcgagtatgcggcgcttgggatgaaagcgaacttcagcttgtttgacgataccgatcagcttgctttgcttaaagagttgaccgaggggctgattgaagatgacaaagttctcctgcaacaactgattagcaccatctctaactggaagaatgatctcaaaacaccgtcccaggcggcagcaagtgcgattggcgagcgggaccgtatttttgcccattgttatgggctgtatgatgcacacctgaaagcctgtaacgttctcgacttcgatgatctgattttattgccgacgttgctgctgcaacgcaatgaagaagtccgcaagcgctggcagaacaaaattcgctatctgctggtggatgagtatcaggacaccaacaccagccagtatgagctggtgaaactgctggtgggcagccgcgcgcgctttaccgtggtgggtgacgatgaccagagcatctactcctggcgcggtgcacgtccgcaaaacctggtgctgctgagtcaggattttccggcgctgaaggtgattaagcttgagcagaactatcgctcttccgggcgtattctgaaagcggcgaacatcctgatcgccaataacccgcacgtctttgaaaagcgtctgttctccgaactgggttatggcgcggagctaaaagtattaagcgcgaataacgaagaacatgaggctgagcgcgttactggcgagctgatcgcccatcacttcgtcaataaaacgcagtacaaagattacgccattctttatcgcggtaaccatcagagccgggtgtttgaaaaattcctgatgcaaaaccgcatcccgtacaaaatatctggtggtacgagctttttctctcgtcctgaaatcaaggacttgctggcttatctgcgcgtgctgactaacccggacgatgacagcgcatttctgcgtatcgttaacacgccgaagcgagagattggcccggctacgctgaaaaagctgggtgagtgggcgatgacgcgcaataaaagcatgtttaccgccagctttgatatgggcctgagtcagacgcttagcggacgtggttatgaagcattgacccgcttcactcactggttggcagaaatccagcgtctggcggagcgggagccgattgccgcggtgcgtgatctgatccatggcatggattatgaatcctggctgtacgaaacaagccccagcccgaaagccgccgaaatgcgcatgaagaacgtcaaccaactgtttagctggatgacggagatgctggaaggcagtgaactggatgagccgatgacgctcacccaggtggtgacgcgctttactttgcgcgacatgatggagcgtggtgagagtgaagaagagctggatcaggtgcaactgatgactctccacgcgagcaaagggctggagtttccttatgtctacatggtcggtatggaagaagggtttttgccgcaccagagcagcatcgatgaagataatatcgatgaggagcggcggctggcctatgtcggcattacccgcgcccagaaggaattgacctttacgctgtgtaaagaacgccgtcagtacggcgaactggtgcgcccggagccgagccgctttttgctggagctgccgcaggatgatctgatttgggaacaggagcgcaaagtggtcagcgccgaagaacggatgcagaaagggcaaagccatctggcgaatctgaaagcgatgatggcggcaaaacgagggaaataatcaaggccggaaaagatgcgtcagcatcgcatccggcacttactcattaatgcacttccagcggccagtggacatagctctgccactggctttcctgagcaataatctctttacccagcggatgttgggttagccaaccttgcggaagcgtcaaggtcaacagttcatggttagcctgtaatgtcatctctggcacgagatcgtcacggcgacggctggcaaaaatgatggccaggcgtagtaaacggcagagttgttctgcgacgcgcggcggtacggcattttgctgatgcaggctactgagatcgaccggattagtctggttgagcagtagcgtcgccagcaattttttctgtgcgggggtaaaaccgggaagatccagattacgcaccagataagcagcgtgttgcggcgcttgtttgaagtcaacgctcaggccgatttcatgaagctgacaggcgctgatgagcaaatcgcggcttattgcttcaagatgccattcgttttccacctgatcgaagaagttagccgcaactttggctacgcgctgtgcctgatcaatatcgatcataaagcggcgttgaatattacgcagcgtacggctgcgaatatcctgctcgacggccagatgcaacatgccgtagaccaggccttcacgcagcgcaccgcccgccagggtcatacactgaatattcagttcggtaaaaatggcgatcaggatcgccagaccactcgggaacactaacgcacgttccagcgtcagcccgtcaatctccagttcctccagccgaccgcaatgaatggctcgctgtttcaattgctgcaacttttccagggtaatgcgttcatccatcccctgtgccatcatgatttcctgtaacgcctgcacggtgccggaagcaccaacgcacactttccagccgtgataccgtaattcatcggcaaccggacgtaacacttcgcgtgccgctttttctgcagcatcaaaattttcctgccccagattacgatcggcaaaatagcgttccagccaggtgacgcagcccatgctcaggctgaacaagctggtggtttgtgcacccgtgccggttaccagttcagtactggctccgcctatatccaccaccaggcgctgatcggcaccaccagtggtgtgagcaacgccctgataaatcagacgtgcttcctcttcaccgctgatcacctgtaccggacaaccgagaatttcctgcgctttggcaataaaatcacccgcattgacggcaaggcgtaacgtcgccgtagcgacaacgcgaatttggctgggaggaatatcttgcagacgttcagcaaacaggcgcaaacattgccaaccgcgctccattgcttcattggagagggcattttcgctattcaggccagcagccagacgcactttgcgttttattcgcgtcagcgtctggatgcttccagccacctcgcgcacaaccagcatatgaaaactattgctaccgagatcaatggctgcatacaggctgctggtggaacccatactcttcatccttcaatctgtctctgtgttggctgcattctttcacctgaatcacttactacagtaagctcatcgggattcattctcttgccatcttgatacagtttgaatgattttgagtatgacattttttatttaaccactacgacgacgattacgcggagcgccagtacgacgcggaccattgcctgtgcgcgggcgcgtgaggcgcagcggttttggcagatcggtcatcaatgcgtccggattgtatttgcttaccggaatactgtgaccaatataggtctcaatagcaggcaaattcaatgcatactcttcacacgccaggctgatagagtgaccgcttgcgcctgcgcgacctgtacgaccaatacggtgaacgtaatcttcacagtcatcgggtaaatcgtagttaaagacgtgcgtcactgccggaatatgcaaaccacgcgcggcaacgtcggtggcaaccagaatatccagatcgccacgggtaaattcatcaagaatacgcagacgttttttctgcgcgacatcgcctgtcaataaaccgacacgatgaccatctgctgccaggtggccccagatctcttcacaacggtgtttggtgttggcgaaaataatcgctctgtctggccactcttcttcgatcagcgtttgcagcaaacgcattttttcttcgttagaagggtagaaaagctcttctttaatacggtggcccgttttctgttccggttccacttcaatatattcggcattgttcatctgctcgaacgccagttcacgtacccggtagctaagcgtggcggagaacagcatgttgaggcgctggtttgcaggcggcatacggcggaacagccagcggatatctttaataaagcccagatcgtacatgcgatcggcttcgtccagtaccaccacctgaatggcaccgaggttaatgtggttctgcttggcgtagtcaattaaacgccccgtggtgccaatcagaatgtcaacgccgctttccagcactttcagctgtttgtcgtagccatcaccaccgtaagccagacccagcttcaggccagtagcttccgccagcggttctgcgtcggcatggatctgcacggcaagttcacgcgtcggtgccataattaaggcacgcggctgattcaccttgcgatcggcaatcgcaggatgagagagaagataatgaaacgtactcgtaagaaacgccatcgttttcccggtaccggtttgcgcctgcccggctacgtcacgacccgccagcgtcagcggaagggccagtgcctgaatgggcgtacagttatgaaacccttttttttcaagggcttctacaaccttcggatgcagggcgaagtcggaaaacttctgttctgttaaatgtgttttgctcatagtgtggtagaatatcagcttactattgctttacgaaagcgtatccggtgaaataaagtcaacctttagttggttaatgttacaccaacaacgaaaccaacacgccaggcttattcctgtggagttatatatgagcgataaaattattcacctgactgacgacagttttgacacggatgtactcaaagcggacggggcgatcctcgtcgatttctgggcagagtggtgcggtccgtgcaaaatgatcgccccgattctggatgaaatcgctgacgaatatcagggcaaactgaccgttgcaaaactgaacatcgatcaaaaccctggcactgcgccgaaatatggcatccgtggtatcccgactctgctgctgttcaaaaacggtgaagtggcggcaaccaaagtgggtgcactgtctaaaggtcagttgaaagagttcctcgacgctaacctggcgtaagggaatttcatgttcgggtgccccgtcgctaaaaactggacgcccggcgtgagtcatgctaacttagtgttgacttcgtattaaacataccttattaagtttgaatcttgtaatttccaacgcttcccgttttatcttaaatgcgaagtgaacagatttctggcagcagtctcaatccgtcttgtcgtttcagttctgcgtactctcctgtgaccaggcagcgaaaagacatgagtcgatgaccgtaaacaggcatggatgatcctgccataccattcacaacattaagttcgagatttaccccaagtttaagaactcacaccactatgaatcttaccgaattaaagaatacgccggtttctgagctgatcactctcggcgaaaatatggggctggaaaacctggctcgtatgcgtaagcaggacattatttttgccatcctgaagcagcacgcaaagagtggcgaagatatctttggtgatggcgtactggagatattgcaggatggatttggtttcctccgttccgcagacagctcctacctcgccggtcctgatgacatctacgtttcccctagccaaatccgccgtttcaacctccgcactggtgataccatctctggtaagattcgcccgccgaaagaaggtgaacgctattttgcgctgctgaaagttaacgaagttaacttcgacaaacctgaaaacgcccgcaacaaaatcctctttgagaacttaaccccgctgcacgcaaactctcgtctgcgtatggaacgtggtaacggttctactgaagatttaactgctcgcgtactggatctggcaagtcctatcggtcgtggtcagcgtggtctgattgtggcaccgccgaaagccggtaaaaccatgctgctgcagaacattgctcagagcattgcttacaaccacccggattgtgtgctgatggttctgctgatcgacgaacgtccggaagaagtaaccgagatgcagcgtctggtaaaaggtgaagttgttgcttctacctttgacgaacccgcatctcgccacgttcaggttgcggaaatggtgatcgagaaggccaaacgcctggttgagcacaagaaagacgttatcattctgctcgactccatcactcgtctggcgcgcgcttacaacaccgttgttccggcgagtggtaaagtgttgaccggtggtgtggatgccaacgccctgcatcgtccgaaacgcttctttggtgcggcgcgtaacgtggaagagggcggcagcctgaccattatcgcgacggcgcttatcgataccggttctaaaatggacgaagttatctacgaagagtttaaaggtacaggcaacatggaactgcacctctctcgtaagatcgctgaaaaacgcgtcttcccggctatcgactacaaccgttctggtacccgtaaagaagagctgctcacgactcaggaagaactgcagaaaatgtggatcctgcgcaaaatcattcacccgatgggcgaaatcgatgcaatggaattcctcattaataaactggcaatgaccaagaccaatgacgatttcttcgaaatgatgaaacgcagttaaatttgtcttatgccaaaaacgccacgtgtttacgtggcgttttgcttttatatctgtaatcttaatgccgcgctggcgatgttaggaaaattcctggaatttgctggcatgttatgcaatttgcatatcaaatggttaatttttgcacaggactggtgggtttggaacggactttcccttctgaataaaggtcttcgtggttatacttctgctaataattttctctgagagcatgcattgtgaatttactgacagtgagtactgatctcatcagtatttttttattcacgacactgtttctgttttttgcccgtaaggtggcaaaaaaagtcggtttagtggataaaccaaacttccgcaaacgtcaccagggattgatacctctcgttggggggattagcgtttacgcagggatttgcttcacgttcggaattgtcgattactatattccgcatgcatctctctatctcgcttgtgccggtgtgcttgttttcattggcgcgctggatgaccgttttgatatcagcgtaaaaatccgtgccaccatacaggccgctgttggcattgttatgatggtgttcggcaagctttatctcagtagcctgggttatatctttggctcctgggagatggtgctcggaccgtttggttacttcctgacgctatttgccgtctgggcggccattaatgcgttcaacatggttgatggcattgatggcttgctgggcgggttgtcctgcgtcagctttgcagcaatcggtatgattttgtggttcgacgggcaaaccagcctcgcaatctggtgctttgcgatgatcgccgccatcctgccatacatcatgcttaaccttggtatcctgggtcgccgctacaaagtctttatgggtgatgcgggcagtacgctgattggttttaccgttatctggatcctgctcgaaacgacccagggcaaaacccatcccatcagcccggttaccgctttgtggataatcgccattccgctaatggatatggtggcgattatgtaccgtcgcctgcgtaaaggcatgagcccattctctcctgaccgtcagcatattcaccatttgatcatgcgtgccgggtttacttcccgtcaggcgtttgtgctgattacccttgccgcagcactgctcgcttccattggcgtgctggcagaatattctcattttgtcccggagtgggtcatgctggtgctctttttgctagcattcttcctctatggatattgcattaagcgtgcctggaaagttgctcgctttattaagcgcgtaaaacgcagactgcgtagaaatcgtggtggcagccccaatttaaccaaataaatgaggatgtgatgacacaaccaatgcctgggaaaccggccgaagacgctgaaaatgaactggatattcgtgggttgtttcgtaccttgtgggctgggaagctatggattattggcatggggctggcgtttgcgttaatcgcgctggcgtatacgttttttgctcgtcaggagtggagcagcacggcgattaccgatcgtccaacggtgaatatgctggggggatattacagccagcagcaatttttgcgtaacctggatgtccgtagtaacatggcttctgccgaccaaccaagcgtcatggacgaagcctataaagagtttgttatgcaactggccagctgggatacccgcagagagttctggctgcaaaccgactattacaaacagcggatggtgggcaacagcaaagccgatgcggcgttgctggatgaaatgattaacaacatccagtttatccccggagactttacccgcgcggtcaatgacagcgtgaagcttattgccgaaaccgcgcctgacgctaataacctgttacgtcagtatgttgcttttgccagccagcgtgcagccagccatctgaatgatgagctgaaaggcgcatgggcggcgcgtaccatccagatgaaagctcaggtgaagcgtcaggaagaggtggcgaaagccatctacgaccgccggatgaacagcattgagcaggcgctgaaaattgctgagcagcataatattagccgcagtgcgacagatgtacctgccgaggaattacctgatagtgaaatgttcctgcttgggcgtccaatgcttcaggctcgactggaaaatttacaggccgtcggtccggcctttgatctcgactatgatcagaatcgggccatgttaaacaccctgaatgttggtccaaccctggatccgcgttttcagacctatcgctatttgcgtacgccggaagaaccggtaaaacgcgatagcccacgtcgtgccttcctgatgattatgtggggcattgtcggggggctgatcggggctggtgtcgcattaacccgccgttgcagcaaataacaacactgctgcggtgagcgcaaaggcgctcgccgcttattcgaagagaatcgatgtgaaagtactgactgtatttggtacgcgcccggaagccatcaagatggcgccgttggtgcatgcgttggcaaaagatcctttttttgaggctaaagtttgcgtcactgcgcagcatcgggagatgctcgatcaggtgctgaaactcttttccattgtacctgactacgatctcaacataatgcagccaggacagggcctgacagagataacctgtcggattctggaagggctaaaacctattcttgccgagttcaaaccagacgtcgtgctggttcacggcgatacgacgacgacgctggcaaccagcctggcggcgttttatcagcgtattcctgttggtcacgttgaggctggtctgcgcacgggcgatctctatagcccgtggccggaagaggctaaccgtacattgaccgggcatctggcgatgtatcacttctctccaaccgaaacttcccggcaaaacttgctgcgtgaaaacgttgcggatagccgaatcttcattaccggtaatacagtcattgatgcactgttatgggtgcgtgaccaggtgatgagcagcgacaagctgcgtagtgaactggcggcaaattacccgtttatcgaccccgataaaaagatgattctggtgaccggtcacaggcgtgagagtttcggtcgtggctttgaagaaatctgccacgcgctggcagacatcgccaccacgcaccaggacatccagattgtctatccggtgcatctcaacccgaacgtcagagaaccggtcaatcgcattctggggcatgtgaaaaatgtcattctgatcgatccccaggagtatttaccgtttgtctggctgatgaaccacgcctggctgattttgaccgacagtggcggcattcaggaagaagcgcctagcctggggaaacctgtgctggtgatgcgcgataccactgagcgtccggaagcggtgacggcgggtacggtgcgtctggtaggcacggataagcagcgaattgtcgaggaagtgacgcgtcttttaaaagacgaaaacgaatatcaagctatgagccgcgcccataacccgtatggtgatggtcaggcatgctctcgcattctggaagcgttaaaaaataatcggataagtctatgagttttgcgaccatttctgttatcggactgggttatatcgggctgccaacggcagcagcgtttgccagtcggcaaaaacaggtaattggtgtcgatatcaaccaacatgcggttgataccatcaatcgtggcgaaatccatatcgtcgaacctgatttggcgagtgtagtaaaaactgccgtagaaggcggttttttacgagcgagcacgacgccagttgaagcggatgcctggctgattgctgtacccacgccgtttaagggcgatcatgagccagatatgacctacgttgaaagcgctgctcgctccattgcgccagtgctgaaaaaaggcgcgctggtgatccttgaatccaccagcccggtggggagtaccgagaagatggcagaatggttagcagagatgcgtccggatctcactttcccgcagcaggtgggcgagcaggcggacgtcaacattgcttactgcccggaacgcgtgttaccaggacaggtaatggtcgagctgattaaaaacgatcgcgtgattggtggtatgacgccggtttgtagcgcccgcgccagcgaactgtacaaaattttcctcgaaggtgagtgtgtcgtcactaacagccggacggcggaaatgtgtaagctcaccgaaaacagcttccgcgatgtgaatatcgcttttgctaatgaattgagcctgatttgtgccgatcaggggattaacgtctgggaactgattcgcctggcgaatcgtcaccctcgcgttaatattcttcagcctggccctggcgtgggcggtcactgcattgctgttgatccgtggtttatcgtggcacagaacccccagcaggcgcggcttatccgtaccgcgcgcgaagtgaacgatcacaaaccgttctgggttatcgatcaggtgaaagcggcggtggctgattgcctggcggctaccgataaacgcgccagtgaactgaaaatcgcctgctttggtctggcgtttaaaccgaatattgatgacctgcgcgaaagcccggcgatggaaatcgctgaactgatcgcccagtggcatagcggcgaaactctggttgttgagcctaacatccaccagttgccgaaaaaactgaccgggctttgtactctggcgcagcttgacgaggcgctggcaacggcagacgtgctggtgatgctggtcgatcatagtcagttcaaagttatcaatggcgacaatgtccatcagcagtatgtcgtcgatgccaaaggagtctggcgctgatgagaaaaattctgataacaggtggtgccgggtttattggcagcgcgctggtgcgttatatcatcaacgaaacgagcgacgcggtggtagtggtcgataagctgacctacgccggaaacctgatgagcctggcaccggtcgcgcaaagcgagcgctttgcctttgagaaagttgatatctgcgatcgggcagaactggcacgcgtattcactgagcatcagccagactgtgtcatgcatctggcagccgaaagccatgttgaccgttctattgacggcccggcagcgtttattgaaaccaacattgtcgggacttatacattgcttgaagcggcgcgggcttactggaatgcgctgacggaagataaaaaaagtgcgttccgttttcatcatatctccactgacgaagtatatggtgacctgcacagcacggatgatttcttcaccgaaaccacgccgtatgcgccgagcagcccttattccgcgagtaaagccagcagcgaccatctggtgcgcgcctggctgcggacctatggtctgccgacgcttatcaccaactgcagcaataactacggcccttaccactttccggaaaaactgatcccgctgatgatcctcaacgcgctggcgggtaaaagcctgccggtatatggcaacgggcagcaaatccgtgactggctgtatgtggaagatcacgcccgcgcgctgtattgcgtggcgaccaccgggaaagtcggtgaaacctataatattggtggtcacaacgagcgtaagaatctcgatgttgtggaaaccatttgcgagctgctggaagaactggctccgaacaagccgcacggcgtggcgcactatcgtgacctgatcacctttgtcgctgaccgtccggggcatgatctgcgttatgccattgatgctagcaaaattgcccgtgaacttggctggctgccgcaggaaacctttgaaagtggaatgcgtaaaacggttcagtggtatctggctaatgaaagctggtggaagcaggtgcaggacggcagctatcagggcgagcgtttaggtctgaaaggctaattttcagcggaggcaaacatgaaaggtattatcctggcgggcggttccggcacccgattgcatccgattacgcgcggcgtaagcaagcaactgttgccgatttacgataagccaatgatttactatccgctgagcgtgctgatgctggccggtatccgcgaaattctcatcatcactacgccggaagataaaggttatttccagcgcctgctgggcgatggtagtgagttcggtatccagctggaatatgccgaacagcccagcccggacggtctggcgcaggcctttatcatcggtgaaaccttccttaatggtgaaccttcttgtctggtgctgggcgataacatcttcttcggtcagggcttcagtccgaagctgcgtcatgttgcggcgcgcaccgaaggggcgacggtttttggctatcaggtgatggacccggaacgctttggcgtggtggagtttgacgacaatttccgcgctatcagcctggaagaaaagccaaaacagccgaagagtaactgggcggtgaccgggctttatttctacgacagtaaagtcgtggagtacgcaaagcaggtgaagccgagcgagcgtggtgaactggagattacctccatcaaccagatgtacctcgaggcgggcaacctgaccgttgaactgctcgggcgcggatttgcctggctggataccggcactcacgacagcctgattgaagccagcacctttgtacagacggtggaaaaacgccagggctttaagattgcctgcctggaagagattgcctggcgtaacggctggctcgatgacgagggtgtgaagcgtgctgccagtagtttagcgaaaactggctacggccaatatctgctggagttacttcgtgcccgtccgcgccagtattgagccactaacctgggaaaacgccttctttggtgttaacagcgccatcgtgcgcattacgtctgaagcaccgctcctgacgccagacgcgttagcgccgtggtcacgggtgcaggccaaaattgcggcaagtaatacgggtgaactggatgccctgcaacagctgggattctccctggtagaaggtgaagttgatttggcgctacccgtgaacaatgccagtgatagcggtgctgtagtggcacaagagaccgatattcccgcattacgtcagttagccagcgccgcatttgcgcaaagccgttttcgtgcgccgtggtatgcgcctgacgccagcagtcgcttttatgcacagtggattgaaaatgccgtgcgcggcacctttgatcatcaatgtctgattttacgtgcggcgtccggcgatattcgcggctatgtctctttacgggaactcaatgcgacagatgcgcgaattggcctgctggctggacgcggtgcaggtgctgagctgatgcaaacggcgctaaactgggcgtatgctcgcggtaaaacaactttgcgggtggcgacccaaatgggcaacaccgccgcgcttaaacgatacatacaaagtggtgcgaatgtagaaagcaccgcgtactggttatacaggtgatcacatgattccatttaacgcaccgccggtggtgggaaccgaactcgactatatgcagagcgcaatgggtagcggcaaactgtgtggcgatggcggttttacccgtcgctgccagcagtggctggagcaacgttttggcagcgccaaagtgttactgacgccgtcctgcaccgctagcctggagatggcggcgctgctgctcgatatccagcctggcgatgaagtgatcatgccgagctacacctttgtctccaccgccaatgcctttgtgctgcgtggcgcaaaaatcgtttttgtggatgttcgcccggacaccatgaacatcgacgaaacgctgattgaagcggcgatcaccgacaaaacgcgcgttatcgtgccggtccattacgcgggtgtggcctgcgaaatggacaccattatggcgttggcgaaaaagcataatttgtttgtggtagaagatgccgctcagggcgtgatgtccacttacaaagggcgtgcactgggaaccattggtcatattggctgctttagcttccatgaaaccaaaaactacacggcgggcggtgaaggcggcgcgacgctgattaacgataaagcgttaatcgaacgagccgagatcatccgtgaaaagggcactaaccgcagccagttcttccgtggtcaggtcgataaatatacctggcgcgatattggctccagctatttgatgtccgatctgcaagctgcatacctgtgggcgcaactggaagcagcggatcgtatcaaccagcaacgtctggcgctgtggcaaaactactacgatgcgttagcgcctctggcgaaagccgggcgtatcgagctgccgagcattcccgatggctgcgtgcagaacgcgcatatgttctacattaaactgcgggatattgatgaccggagcgcgttgattaactttctgaaagaagcggaaatcatggcggtgtttcattacattccgctgcacggttgccctgcgggggaacactttggtgagttccacggtgaagatcgctacaccaccaaagagagcgagcgcctgctgcgcctgccgctgttctacaacctgagccccgtcaatcagcgtacggtaattgcgactttgttgaactacttttcctgatatgagcttggcaaaagcgtccttgtggacggcggccagtacactggtcaagattggtgccgggttactggtcggtaagttgctggcggtgagttttggtccggcggggcttgggctggcggcaaatttccgccagttgattaccgtgctcggcgtgcttgccggggctggcatctttaacggtgtaaccaaatacgttgcccagtaccatgataatccgcaacagctgcgccgcgtggtcggcactagtagtgcgatggtacttggtttctctacgctgatggcgctggtttttgtgctggcagctgcgccaatcagccagggattgtttggtaataccgactatcaggggctggtgcgtttagtggcgctggtgcaaatggggatcgcctggggcaacctgttactggcgctgatgaaaggctttcgcgatgccgcaggtaatgcgttaagcctgattgtcggcagcttgattggcgttctcgcgtactacgtcagttaccgtttgggcggttatgaaggggcgttgctgggtctggcgctgattcccgcgctggtggtaattcctgccgccatcatgttgatcaaacgtggtgtcatcccgttaagctatctgaaacccagctgggataacggtctggcagggcagttgagcaaatttacgctcatggcgttgattacgagcgtgaccttgcctgttgcttacatcatgatgcgtaaactgctggcggcgcagtatagctgggatgaggtggggatctggcaaggggtgagcagtatttccgatgcctacctgcaatttattacggcaagcttcagcgtatatttgctgcccacgttgagccggctaacggaaaagcgcgatatcacccgggaagtggttaaaagcctgaaattcgtcttaccggcagtggcggcggcgagttttaccgtctggctgctgcgtgattttgctatctggctgctgttgagcaataaatttaccgctatgcgcgatctctttgcctggcagttagtgggtgatgtgttaaaagtgggcgcttatgtctttggttatctggtgatcgccaaagcgagtctgcggttttatattctggcggaagtcagccagttcactttattgatggtatttgcccactggctaatccctgcgcatggtgcactgggcgcggcgcaggcatatatggcaacttatatcgtctatttttctctttgttgtggcgtgtttttactctggcgtaggcgggcatgactgtactgattcacgtactgggaagcgatatccctcaccataaccgaaccgttttgcggtttttcaatgacgcgctggccgcgacgagcgagcacgcgcgcgagtttatggttgttggcaaggacgacggcttaagtgatagctgtccggcgctttctgtgcaatttttccctgggaaaaaaagcctggcggaagcggtcatcgcgaaagcaaaagctaaccgtcagcagcgttttttcttccacggtcagttcaatcccacactgtggctggctctgctgagtggtggcattaagcccagccagtttttctggcatatctggggggcagacctgtatgagctttccagtggcttgagatataagcttttttacccactacgtcgcctggcgcaaaagcgagtcggctgtgtatttgccacccgcggcgatttgagcttttttgccaaaacgcacccaaaggtgcggggcgaactgctgttcttcccgacgcggatggaccctagcctcaatacgatggcgaacgatcggcaacgtgaagggaaaatgaccattctggtggggaactccggcgaccgcagcaatgagcatattgctgccttgcgcgccgttcatcagcaatttggcgatacggtaaaagtggtggtgccgatgggatatccgcctaataacgaagcgtacattgaggaagttcgtcaggcggggctggagttattcagcgaagaaaatctacaaattctgagcgaaaaactggaatttgacgtctatctggcgctacttcgtcagtgcgatcttggttactttatttttgcccgccagcagggcattggtacgctgtgcttactgattcaggcgggcattccttgtgtgcttaaccgggaaaatccgttctggcaggatatgacggaacaacatttgccggtgctgtttactaccgacgatctcaacgaggatattgtgcgtgaagcgcagcgccagttggcgagcgtggataaaaacaccattgccttctttagccctaactatctacaaggctggcagcgggcgttggcgattgccgccagggaggtcgcatgagtctgctgcaattcagtggcctgtttgttgtctggctgctctgcacgctgtttattgccacgctgacctggtttgagtttcgccgtgtgcgctttaacttcaatgtcttctttagtttgctgtttttgctcacctttttcttcggcttcccgctgaccagcgtgctggtatttcgctttgatgttggtgtcgcgccgccagaaatcttgttgcaggcgttgctttctgcgggctgcttctacgcggtttactatgtcacctacaaaacccgcctacgcaaacgcgttgctgatgtaccgcgccgtccgctgtttaccatgaaccgcgtggagaccaatcttacgtgggtgatcctgatgggtatcgcgctggtaagcgtcggcatcttcttcatgcacaacggctttttgctgttccggcttaactcctacagtcagatcttttccagtgaagtctccggcgtggcgttaaaacgcttcttttactttttcatcccggcgatgctggtggtctactttctgcgccaggacagcaaagcgtggctgtttttcctcgtcagcacggtcgcctttggcttgctgacttatatgattgtcggcggcactcgcgccaatatcatcatcgcattcgctatcttcctgtttattggcattattcgcggctggattagcttgtggatgctggcggcggcgggcgtgctggggattgttggcatgttctggctggcactaaaacgctatggaatgaatgtgagcggcgatgaagcgttctatacgtttctctatctcactcgcgacaccttcagcccgtgggagaatctggcgttgctgttgcagaactacgacaacatcgacttccagggcctggctccaattgtccgcgatttctatgtctttatcccttcctggctgtggccgggtcgcccgagtatggtgctgaacagtgccaactactttacctgggaagtgctgaataaccactccggactggcgatcagccctacgcttataggcagtctggtggtgatgggcggcgcgttgttcatcccgctcggggcgatcgtggttggtctgatcatcaaatggttcgactggctgtatgagctgggcaaccgcgagcctaatcgctataaagctgcgatattgcacagtttctgctttggggcgatcttcaatatgatcgtgctggcgcgtgaagggctggatagctttgtcagtcgcgtggtcttttttatcgtggtcttcggcgcatgtctgatgatcgcaaaactgttgtactggctttttgaaagcgccggactcattcataaacgtacaaaaagtagcctccggacgcaggttgaaggataacaatgaataacaacaccacggcaccaacctatacgctgcgtggcttacagttgattggttggcgtgatatgcagcacgccctcgattatctgtttgctgacgggcagcttaagcagggaacgctggttgccattaatgctgaaaaaatgctgactattgaagataacgccgaggtcagggagttaattaacgctgccgaatttaaatatgcggatggcatcagcgttgtacgtagtgtacgtaaaaagtacccgcaggcgcaggtttcccgcgttgccggtgccgatctctgggaagagctgatggcgcgcgcaggcaaagaagggacgccggtatttcttgtgggcggtaaacctgaagtgctggcgcaaactgaagctaaactgcgcaaccagtggaatgtgaatatcgttggcagtcaggatggttattttaaacccgagcagcgtcaggcgctgtttgaacgcattcatgccagcggtgcgcaaatcgtcaccgttgcgatgggaagcccaaagcaggagatcatcatgcgcgactgccgtctggtacatccagatgcgctgtatatgggcgttggcgggacttacgatgttttcaccggtcacgtaaaacgcgcaccgaaaatctggcaaacgctggggctggagtggctctaccgcctgcttagccagccgagccgcattaagcgtcagcttcgtttgctgcgttatttacgctggcactacaccggcaacctatgattttcctctctttgtaaagcgacggagtggtcactccgtcgcctgtctgcttttttattacacaaagcattcaaatttttaatgctttatttgccatttctcctgaattacgaaaacatttgcaacactcgatgtacccataacgataaccggtaacaccggaaagcatgcaaacacaacacgaggatttatggcagataacaaaccagagctacagcgtgggctggaagctcgacatatcgaactcatcgccctggggggcaccattggcgtcggcctgtttatgggggccgccagtaccctgaaatgggccgggccatccgtattgttggcctatatcatcgccgggctgttcgtctttttcatcatgcgtagtatgggcgaaatgttgttcctcgaaccggttaccggtagcttcgccgtttatgcgcatcgttatatgagcccgttctttggctatctcaccgcctggtcttactggtttatgtggatggcggtggggatctctgaaatcaccgccattggcgtttatgtccagttctggttcccggagatggcgcagtggatacccgcattgatcgcagtggcgctggtggcgttggcgaatctggcggcggtgcggttgtacggcgaaatcgagttctggttcgcgatgatcaaagtcaccacgattatcgtgatgattgtcattggcctgggcgtgattttctttggctttggcaatggcgggcagagcattggttttagcaatctcacagagcatggcggtttctttgcgggtggctggaaagggttcctgaccgctctgtgtattgtggtggcgtcctaccagggcgtggagctgattggcattactgccggtgaagcgaagaatccgcaggtgacgctgcgcagtgccgtaggcaaggtgctgtggcggatcctgattttctacgtaggcgcgattttcgttatcgtcaccatcttcccgtggaatgaaataggcagcaacggcagcccgttcgtactgacttttgccaaaatcggtattaccgcagcggcgggcattatcaactttgtggtgctgacggctgcgctctctggctgtaacagcggcatgtacagttgcggacgtatgctctacgcactggcgaaaaaccgtcagttaccggcggcaatggcgaaagtttcccgtcacggcgtaccggttgcgggtgtggcagtatctattgctattctgctaattggcagttgcctgaactacatcattcccaatccgcagcgtgtgtttgtctacgtctacagtgccagcgtgcttccggggatggtgccatggtttgtgatattgataagccagctgcgttttcggcgtgcacataaagcggcgattgccagccatccgttccgcagtatcctgttcccgtgggccaattacgtaacaatggcattcctgatttgcgttttgatcggcatgtactttaatgaagatacgcgtatgagcctgtttgttggcatcatctttatgctggcggtgacggcgatttataaagtttttggccttaatcgccacgggaaagcgcataaactggaggaataagcagcaaaacgcacaaaccgtaaccaaacgcgcaatttatttaaaaagggactagacagaggggtgggaagtccgtattatccacccccgcaacggcgctaagcgcccgtagctcagctggatagagcgctgccctccggaggcagaggtctcaggttcgaatcctgtcgggcgcgccatttagtcccggcgcttgagctgcggtggtagtaataccgcgtaacaagatttgtagtggtggctatagctcagttggtagagccctggattgtgattccagttgtcgtgggttcgaatcccattagccaccccattattagaagttgtgacaatgcgaaggtggcggaattggtagacgcgctagcttcaggtgttagtgtccttacggacgtgggggttcaagtccccccccctcgcaccacgactttaaagaattgaactaaaaattcaaaaagcagtatttcggcgagtagcgcagcttggtagcgcaactggtttgggaccagtgggtcggaggttcgaatcctctctcgccgaccaattttgaaccccgcttcggcggggttttttgttttctgtgcatttcgtcaccctcccttcgcaataaacgcccgtaataactcattgccccacggtatgatttcgcccttaacgtattgaaggatgacttcaggcaaggagcgaccatgctgcaacaggttccaacgcgtgcttttcatgtgatggcgaaaccgagcggttccgattgtaatctgaactgtgactactgtttttatctcgaaaaacaatccctttaccgcgaaaagccagtcacgcatatggacgatgacacgctggaagcgtatgtccgtcactatatcgctgccagcgaaccgcaaaacgaagtggcttttacctggcagggcggcgaaccaacgctactcgggctggcgttttaccgccgtgccgtagcgctacaggcgaaatatggtgctggcaggaagataagtaacagcttccagactaacggcgtgctgctggatgacgaatggtgcgcgtttctcgcggagcatcattttcttgttggtttaagcctggatggcccgcctgagatccacaatcaatatcgcgtgactaaaggtggcagacccacgcataagctggtgatgcgtgccctgacgctcctgcaaaaacatcatgtcgactataacgtgctggtctgcgttaatcgcaccagcgcgcagcaaccgttgcaggtatatgattttttgtgcgatgcgggagtcgaattcatccagtttattccggtggtcgagcgcctggctgatgaaacaactgcccgcgatggacttaagttacatgcgcctggtgatattcagggtgagctaacggaatggagcgtgcgccccgaggagttcggtgagtttctggtggcgatattcgaccactggatcaaacgcgacgtcggcaagattttcgtgatgaatatcgaatgggcgtttgccaattttgtcggtgcgccgggtgcggtttgccatcatcagccaacctgtgggcgcagcgtgattgttgagcacaacggcgacgtttacgcctgtgatcactatgtttatccgcaatatcggctggggaatatgcaccagcaaacaattgcagaaatgatcgattccccgcaacagcaggcgtttggtgaagataaatttaagcagttaccggcgcagtgtcgcagttgtaacgtgttaaaagcgtgctggggaggctgcccgaaacaccgcttcatgctcgatgccagcggcaaaccgggactgaattatttgtgtgccgggtatcagcgttatttccgccatctaccgccatatcttaaagcaatggctgatttgctggcgcacggtcgcccggccagcgacattatgcatgcgcatttgctggtggtgagtaagtaaaaatcggcggccgcctgcggttgattgccggatgcggcgtaaacgccttatccggcctacatgatcgtgcaaattcaataaattgcagcgttctgtaggctggataagatgcgtcagcatcgcatccggcaaaggcagatctcagcgatagcgccggcttagtcagatttaatctgcgcgcgtggtggatattttttcaggatctccatatacgcgtgcatttcggtctgtagcggtacacccatcggaatatggcgcacgccgatggagtcgctttcctgcggatcggtgtagaggttaaacacgctgcttcccgccgtttgcattactgtgccggtgaatccaccctgatatccgctctgggtataagcgtaaggttgctgaatcaggacgtgatacttgaactcatccatacgcacagcagcgagtttaccgttgaggaagtagtgctcggccttacggttagactgaccatttgttcccaggaagaaggatgtctggtccacaccatcgataaaggtggttttcggcactaaattcgccactttcgctccaggatgccctgccagatccagcgcggtagggaagagatctgccagatcgacaataccgtcagatttacgcggttggatcatccctttccagtaaacgaaagtcggtacgcgaacgccgccttcccaggtgctacctttcgcaccacggaacggggtgcgtccgtgcggcggtacttcggcttccggtccgttatcggaggtaaagacgatcagcgtgttatcaagctgaccgtttttctccagtgttttatacagattagcgaacacatcgttcatctccaccatgcagtcgccatagctggtgcgtgccggagagctacccgcatatttcgcatttgggtagttatcgaagtggcagccacgagtgccgtagtagaggaagaatggtttatcgctcttcgccatcttgtcgaggaacttaacgccatagtccatccagcgttgatccagatcttccatatatttcggcgtaatgtcggcaatggcctgttgttcgccgccgcgcaccgcatgaacgtcatctttgctgaacggtaattgcttgatgtattcagaacggtccggactcagggccacttccggattgacgtgaacgtcgcgccattcggtgtacatatcagacacgctgttaaagccacggaaatcatcaaagccaacgttctgcggctggctctctttgttttcccccatatgccattttccgatggcctgagtgacgtagccctgatcgtgcagcaactgcggcagcgtggttaacccttgcagcccgcccggttgcccgtacattggcggcatcagaatgccgtggtggatggagtattgtccggtgagaatggtggcgcgggttggggaagagcttggttgagaatacgcgctagttaaaatcagcccctggctggcaacggcgtcgatatctggtgtagggttacccaccgccacgccgccaccgttaaaaccgacgtccatccagcccacatcgtccagcaagaaaacaaccacattcggtttcttaccggtttttttctcaagttctgccagcttctgctgggtttctttatcctgcgccggatgctgcattactggcatcatattgtcggcaatagtggtcgccggtttaaccagatactggtttgggtgatcgtatccggcaaagcctttgcgtgcggtggcagtactcggggtatctgctgcgctggccatgagaggaagagcggcggcgacagcaacaacaagacgtttgggactaaagctaaattccatgcaaaatgctccggtttcatgtcatcaaaatgatgacgtaattaagcattgataattgagatccctctccctgacaggatgattacataaataatagtgacaaaaataaattatttatttatccagaaaatgaattggaaaatcaggagagcgttttcaatcctacctctggcgcagttgatatgtaaggcaggtttattatatcgcgttgattattgatgctgtttttagttttaacggcaattaatatatgtgttattaattgaatgaattttatcattcataataagtatgtgtaggatcaagctcaggttaaatattcactcaggaagttattactcaggaagcaaagaggattacagaattatctcataacaagtgttaagggatgttatttcccgattctctgtggcataataaacgagtagatgctcattccatctcttatgttcgccttagtgcctcataaactccggaatgacgcagagccgtttacggtgcttatcgtccactgacagatgtcgcttatgcctcatcagacaccatggacacaacgttgagtgaagcacccacttgttgtcatacagacctgttttaacgcctgctccgtaataagagcaggcgtttttttatgtatcaggaaggccccggaggtgcttgcctccgggtgagaaggaattactgtggcgggttattctgcaacgttaacatcaaaccgtcgcgacgcatagctgcagcttcttccggcttgtgcagtctgtccagcgcgtcggcaagccatgcgtaatcgtaggcgtccggacgttgtttcagcgctgcgcggaaggcgaggcttgcttcctgccattctccgtgcttcatcagactctggcccagtgtgctccacaacagcgggcgatcgccgacgtttttgatttgctggcgcagcactttttccagctgttccggattgtttgttttcagtcgaggaatcggcagcagtaggcgatcgtcgtactggcgtttcaggccatcgatgataatttgctgggcagtatcatgatcgtcacattcaataagatgttccgccattgccacctgcaacgctacctgatgacgcgttttccggctttggtttttccaccagttacgcaaaccttcgctaccgttatcggcacgcgcctgatccatcaggccaatccatgcctgttgttccagcattgcacgatgttcttcatcaccaacatgggctttcgccatacttgggataatatccagcaggctactccatgcacctgtgcggatatacgcctgttccgccagacgtaatacttccggatggcgtggcgtaacttccagcagcttatccacgccgtggcgtgcagcatggttttcattacgggccagttgcagacgtacgcgggtgatttctaccggaatggtgtcgttgccggccagctccgctgcgcgttccagatgttggttggcgcgtgcttcatcaccacgttgttgcgcggcttcggcagccagtagatagttcaccaccggttgttccgcgtgatcggcatttttcgccatcagcttttcaacttgctgataatcgccttccgccagtttcagcagcgcctgttcggtctgcttacgtgcacggcgacgcttacgtccgacaaaccacccacgggtgtgcgcgccagtgcggaagatccgccgcagtagccactcaatggcaaacagcactaccatcgccagaatcaatatgatcgccaggcccgtgacgctggtttcgatattgtagttgtcggtctggatcagcacataaccctgatggccggcaatcatcgggccaaccacgatccccgcaatcagcaacacaaagagcaataacacttttagcatggttattctccttgcggcgcggctgccggagtatcagcttgcggtgcaggtgcaggtttagcttccgttgtccccgctgccggttgtgccagcaggttacgcacgcgagtctgcatcagtttttccagcatcgcctggctttgcagggtttccggaagatccatgctgatattttgctggcttaactggtccacctcgtcgaggaacgctttggtggtggcatcatcagtatcgtagtaagcacgtacccaggtggagacgttctccagcgcctggcgataagtctcttcctggtgacgcggtacagcttgtgctgcgaccagcaggcgagagcgaatattttcgcgcagatagatatcctgatttggcgctaacagcggtacggcggtgtcatcacgacggcgaatcgtaatgaagttgtccataaagttctgccagcttttttgcagattgatacgccattcgctgatggaactggaaagctcttcaccgtcactatccatcgggctaccatcgctgtcattatcggccagacgcaggttatctacctgattactaagctgattaagcttaaggatgatgccgtcataatccacctggcttactgcagaaaggctggcgatatcatcggtaattgcccgacgaacggtaatcagactcgggtcattcatatccgccaggctggcgtctgcacttttcagcaacgctgcagcggtcgtgacgtcctgatcgctccacagcttccgtccggcgagtttcaccagaaaatcggcctgagccagcagccaggttttagcatcgctgccggaaatggtggcgaccttttgttggacttcatccaactgttttgccagcgtttcttgctgacgattcgcctgcttaagttgtgcagcttgttgcttaataatgccttccagctcggctttttggctctcctgggctttttgcaatgccgtcagttggttagccagggcatcgctggtggcggtctgattgacggcctgttgtttaccccagccatacaaaccgatgcccgccgccagagcaatagcgatagccaccgcgctgagaatcaatgcggtattgttcttactctttttttctgttgcgacaggttgactcgtggtgtccacggcctccctggtctcttcaaccacggcggaggttttttcttgttccgtcattatggcttcctgttatgagagttattgtaatgcccgtaaaagcgcatcgttgtcagcgttatcggcgaccttaatgtcttgccagcccagttcccgggcgagtttcgccaaacgctcactgacgaccaatagtcgacagtgtagtaaccagtgctcacgataccattgtgggatcaggctccagagttgctgcaacatttcaccgctggtaacaacgaccatcgtcacctcgcgggcttgccagcgcatcgcttcttctgcaccatcgtaatggattgcgcatcgttgataacattcacaaaaagtgacctcagcaccgcgcgccgtcagggtatccccaattagctcacgaccaccattgccacgtaatatcagcgcacgtttgcccgcaatattttgtaattcaggtaattgtagcaagacttcgctgatttcccgatcctgcgggtagagaatcttctgtccacttacggtatgtagtgccagtgcggtggtgcgtccaatggcgaaataatcaggtagtcggggccatttacgatcttgctgatgcagctgactttgggcaaaagcaaccgcgtgttggctgagggcaaacaacagatcgctctcccccagcgctgccagttgatcagcaagttgcggtaattgttgacccggagaaaactcaatcagcggaaaatgccaggccacctgccccagtgtgcgcagacggctcactaactcttctccagcgggagacgggcgggtgacaaggatactcatgccggggcgtctccgttatagacttcagcgaggatctcgcgcgcgccgttattcagtagctcttctgccaggctaatccccatttgttcggcatcttgcggcgcaccgcggcgttcaccgcgaataatctggctaccgtccggcgcgccgaccagcgcacgcagccagatttcgccatcaataagctcggcgtagctaccaattggcacctgacatccgccttcgagacgggtattcatggcgcgttctgcggtaacgcgcagtgcagtttcgtggtgattcagcgcggcaagcagctcgcgagtgcgactatcatcaaggcggcattcaatacccaccgcaccttgtcctaccgccggaagagaaatctcgggtggcaacgcggcgcgaatacgactctccagacctaaacgttttagtccggctacggcaagaatgatggcatcgtattcgccgttatccagtttgctcaggcgagtgccgacgttgccgcgcagggagcggataatcagatccggacggcgttcagccagttggcactggcgacgtaaactggacgtcccgacgatactgcctgccggtaacgcatccagactgtcatagttattggacacaaaggcatcgcgaggatcttcacgctcacaaatagtgaccagtcccagaccttgcgggaattcaaccggcacatctttcatactgtgtacggcgatatcggcgcgattttcgaggagcgcgacttccagctcttttacaaataagccttttccgcctactttcgccagcggcgtatcaagaatcacatcgccgcgcgtcaccatcggtaccagttcaacgaccaggcccggatggctcgccatcaacttgtctttgacatagtgtgcctgccagagtgcaagtgggctttggcgtgtggcaattcttaaaacattgtctaacatgcttgttaccgtcattatcatccgtggtccatcctaacatccttgccagagtgatgtcagtgttgtggtgaaacgtagacgcctgcgcaaaccgtaaaatgaggtctggcagtggatcctgacaggcgtttcacgccgttgtaataaggaatttacagagaataaacggtgctacacttgtatgtagcgcatctttctttacggtcaatcagcaaggtgttaaattgatcacgttttagaccattttttcgtcgtgaaactaaaaaaaccaggcgcgaaaagtggtaacggttacctttgacatacgaaatatcccgaatgccgcgtgttaccgttgatgttggcggaatcacagtcatgacgggtagcaaatcaggcgatacgtcttgtacctctatattgagactctgaaacagagactggatgccataaatcaattgcgtgtggatcgcgcgcttgctgctatggggcctgcattccaacaggtctacagtctactgccgacattgttgcactatcaccatccgctaatgccgggttaccttgatggtaacgttcccaaaggcatttgcctttacacgcctgatgaaactcaacgccactacctgaacgagcttgaactgtatcgtggaatgagtgtacaggatccgccgaaaggtgagcttccaattactggtgtatacaccatgggcagcaccagctccgtagggcaaagttgttcctctgacctggatatctgggtctgtcatcaatcctggctcgatagcgaagagcgccaattgctacaacgtaaatgtagcctgctggaaaactgggccgccagcctgggtgtggaagtcagcttcttcctgattgatgaaaaccgcttccgtcataatgaaagcggcagcctggggggcgaagattgtggctccacccagcatatactgctgcttgacgaattttatcgtaccgccgtgcgtctcgccggtaagcgtattctgtggaatatggtgccgtgcgacgaagaagagcattacgacgactatgtgatgacgctttacgcgcagggcgtgctgacgccaaatgaatggctggatctcggtggcttaagcagcctttctgctgaagagtactttggtgccagcctttggcagctctacaagagtatcgattccccatacaaagcggtactgaaaacactgctgctggaagcctattcctgggaatacccgaacccacgtctgctggcgaaagatatcaaacagcgtttgcacgacggcgagattgtaagctttggtctcgatccatactgcatgatgctggagcgtgttactgaatacctgacggcgattgaagattttacccgtctggatttagtacgtcgctgcttctatttaaaagtgtgcgaaaagctcagccgtgaacgcgcctgcgtaggctggcgtcgcgcagtgttgagccagttagtgagcgagtggggttgggacgaagctcgtctggcaatgctcgataaccgcgctaactggaagattgatcaggtgcgtgaggcgcacaacgagttgctcgacgcgatgatgcagagctaccgtaatctgatccgctttgcgcgtcgcaataaccttagcgtctccgccagtccgcaggatatcggcgtgctgacgcgtaagctgtatgccgcgtttgaagcattaccaggtaaagtgacgctggtaaacccgcagattagtcccgatctcagcgaaccgaatctgacctttatttatgtgccgccgggccgggctaaccgtagtggttggtatctgtataaccgcgcgccaaatattgagagcatcatcagccatcagccgctggaatataaccgttacctgaataaactggtggcgtgggcatggtttaacggcctgctgaccagccgcacccgtttgtatattaaaggtaacggcattgtcgatttgcctaagttgcaggagatggtcgccgacgtgagccaccatttcccgctgcgcttacctgcaccgacaccgaaggcgctctacagcccgtgtgagatccgccatctggcgattatcgttaacctggaatatgacccgacagcggcgttccgcaatcaggtggtgcatttcgatttccgtaagctggatgtcttcagctttggcgagaatcaaaattgcctggtaggtagcgttgacctgctgtaccgcaacagctggaacgaagtgcgtacgctgcacttcaacggcgagcaaagcatgatcgaagccctgaaaactattctcggcaaaatgcatcaggacgccgcaccgccagatagcgtggaagtcttctgttatagccagcatctgcgcggcttaattcgtactcgcgtgcagcaactggtttctgagtgtattgaattgcgtctttccagcacccgccaggaaaccgggcgtttcaaggcgctgcgcgtttctggtcaaacctgggggttgttcttcgaacgcctgaatgtaagcgtacagaaactggaaaacgccatcgagttttatggcgcgattagccataacaaactgcacggcctgagtgtgcaggttgaaaccaatcacgtcaaattaccggcggtggtggacggctttgccagcgaagggatcatccagttctttttcgaagaaacgcaagacgagaatggctttaatatctacattctcgacgaaagcaaccgggttgaggtatatcaccactgcgaaggcagcaaagaggagctggtacgtgacgtcagtcgcttctacagcagtagccatgaccgttttacctacggcagtagcttcatcaacttcaacctgccgcagttctatcagattgtgaaggttgatggtcgtgaacaggtgattccgttccgcacaaaatctatcggtaacatgccgcctgccaatcaggatcacgatacgccgctattacagcaatattttagctgatgaacgtgccggaaagcgaggcttatccggcatgcaatcttagcggaaactgactgtttcacccgcctgctgcgtcgccgcctgttccagcaaatcccagaaggtttcgccgctgcgatcacaaatccactcatcgcctttcaggtcaaaatggtagccgccctgtttggttgccagccatacctggtgcagcggctcctggcggttgataatgattttgctgccattctcaaaggtaatggtcagtacgccgccgttgatttcgcagtcgatatcgctgtcgccatcccagtcgtccaggcgttcttcaatggtcagccagagttgatcagccaggcgatgaaattcactgtcgttcattgttgtatcctgtttttaagtgatggcggcagtatagcggcatggggtcagggcttcaaagtttgcacctctgcggctgcgttccggcacgatagttccgtcaccggaataatgatgtctctgtgtagcgaaagatttgtctctagtttagggcgcagttacaccacgtctttccctgtttctggtaaacattatgatcaggtttaccgagcgagcatcctcacgctgacggaactaaaaaagacaacaaacaaaccacattgcgatagtgcataaagccatcctggcgcgaggtgccgatcacgaaactaccagcaaaacataaatccccacgagtaagcgttatactcgcagcatttcctcacttttcagacttcataaagagtcgctaaacgcttgcttttacgtcttctcctgcgatgatagaaagcagaaagcgatgaactttacaggcaatccataatgaaaaacgtgtttaaggcactcactgtattacttactctcttcagcctgacgggctgcggtctgaaaggtccgctctatttcccgcctgcagataaaaacgcaccgccgccgaccaaaccggtagagacgcaaacgcaatccacggtgccggataaaaacgatcgcgccactggcgatggtccatcccaggtgaattactaaaagtcagtttctgtacccgcgtgattggagtaaatgatgcagttcagcaaaatgcatggccttggcaacgattttatggtcgtcgacgcggtaacgcagaatgtcttttttagtccggagctgattcgtcgcctggctgatcggcacctgggggtagggtttgaccaactgctggtggttgagccgccgtatgatcctgaactggattttcactatcgcattttcaatgctgatggcagtgaagtggcgcagtgcggcaacggtgcgcgctgctttgcccgttttgtgcgtctgaaaggactgaccaataagcgtgatatccgcgtcagcaccgccaacgggcggatggttctgaccgtcaccgatgatgatctggtccgcgtaaatatgggcgaacccaacttcgaaccttccgccgtgccgtttcgcgctaacaaagcggaaaagacctatattatgcgcgccgccgagcagacaatcttatgcggcgtggtgagcatgggaaatccgcattgcgtgattcaggtcgatgatgtcgataccgcggcggtagaaacgcttggtcctgttctggaaagccacgagcgttttccggagcgcgccaatatcggttttatgcaagtggttaagcgcgagcatattcgtttacgcgtttatgagcgtggggcaggagaaacccaggcctgcggcagcggcgcgtgtgcggcggttgcagtagggattcagcaaggtttgctggccgaagaagtacgcgtggaactccccggcggtcgtcttgatatcgcctggaaaggtccgggtcacccgttatatatgactggcccggcggtacatgtctacgacggatttattcatctatgaagcaaccaggggaagaactgcaggaaacactcacggagcttgatgaccgggcggttgtcgattatctgattaaaaatcctgagttttttatccgtaatgcgcgcgcagtagaagcgatacgtgtgccgcatccggtacgcggcaccgttagcttggtcgagtggcacatggcccgcgcacgtaatcatattcatgttctggaagagaacatggcgctgttgatggaacaggctatcgccaacgaaggcctgttttatcgcctactctacctgcagcgcagtctcaccgccgccagcagtctcgacgatatgctgatgcgctttcaccgctgggcgcgcgatctcggcctggcaggtgcgagtctgcgcctgtttccggatcgctggcgcttaggtgcgccgagcaaccacactcatctggcattaagccgtcagtctttcgaaccgctgcgtattcagcgtttggggcaggaacagcactatcttgggccgcttaacggaccagagctgctggtggtgctaccggaagcgaaagcggtgggaagcgtggcgatgagcatgctgggaagcgatgctgatttgggtgtcgtgctgtttaccagtcgcgatgccagtcactatcaacaagggcaaggaacgcagttacttcatgaaattgcgctgatgttgccggagcttctggagcgttggattgaacgcgtatgaccgatttacacaccgatgtagaacgctacctacgttatctgagcgtggagcgccagcttagcccgataaccctgcttaactaccagcgtcagcttgaggcgatcatcaattttgccagcgaaaacggcctgcaaagctggcagcaatgtgatgtgacgatggtgcgcaattttgctgtacgcagtcgccgtaaagggctgggagcagcaagtctggcgttacggctttctgcgctacgtagcttttttgactggctggtcagccagaacgaactcaaagctaacccggcgaaaggtgttagcgcaccgaaagcgccgcgtcatctgccgaaaaacatcgacgtcgacgatatgaatcggctgctggatattgatatcaatgatcccctcgctgtacgcgaccgtgcaatgctggaagtgatgtacggcgcgggtctgcgtctttctgagctggtggggctggatattaaacacctcgacctggagtctggtgaagtgtgggttatggggaaaggcagcaaagagcgccgcctgccgattggtcgcaacgctgtggcgtggattgagcactggcttgatttgcgcgacctgtttggtagcgaagacgacgcgctttttctgagcaaactgggcaagcgtatctccgcgcgtaatgtgcagaaacgctttgccgaatggggcataaaacaagggctgaataatcacgttcatccgcataaattacgtcacagcttcgccacgcatatgctggagagcagcggcgatcttcgtggtgtgcaggagctgctgggtcatgccaacctctccaccacgcaaatctatactcatcttgattttcaacaccttgccagcgtgtacgatgcggcgcatccacgcgccaaacgggggaaataatgcgtttttaccggcctttggggcgcatcagcgcgctcacctttgacctggatgataccctttacgataaccgtccggtgattttgcgcaccgagcgagaggcgcttacctttgtgcaaaattatcatccggcgctgcgcagcttccagaatgaagatctgcaacgcctgcgccaggcggtacgggaagcggaacccgagatttatcacgacgtgacgcgctggcgttttcgtagcattgaacaagcgatgctcgacgccgggctgagtgccgaagaagccagtgcaggcgcacacgcagcaatgatcaactttgccaaatggcgcagccgaatcgacgtcccgcagcaaactcacgacaccttaaaacagctggcgaagaaatggccgctggtggcgatcaccaacggtaacgcccagccggagctgtttggtttgggggattattttgagtttgtgctgcgcgctggcccgcacgggcgcagtaaaccgttcagcgatatgtactttttggctgcggaaaaactcaacgtgccgatcggcgagatcttacatgttggggacgatctcaccactgacgtgggtggggcaattcgcagcggaatgcaggcttgttggatcagaccggaaaatggcgatctgatgcaaacctgggacagccgtttactgccgcatctggaaatttcccggttggcatctctgaccagcctgatataatcagcaaatctgtatatatacccagctttttggcggagggcgttgcgcttctccgcccaacctatttttacgcggcggtgccaatggacgtttcttacctgctcgacagccttaatgacaaacagcgcgaagcggtggccgcgccacgcagcaaccttctggtgctggcgggcgcgggcagtggtaagacgcgcgtactggtgcatcgtatcgcctggttgatgagcgtggaaaactgcagcccatacagcattatggcggtgacgtttaccaacaaagcggcggcggagatgcgtcatcgtatcgggcaactgatgggcacgagccagggcggtatgtgggtcggcaccttccacgggctggcgcaccgtttgctgcgtgcgcaccatatggacgccaatctgccgcaggatttccagatcctcgacagtgaagaccagctacgcctgcttaagcgtctgatcaaagccatgaacctcgacgagaagcagtggccgccgcggcaggcaatgtggtacatcaacagccagaaagatgaaggcctgcgtccgcatcatattcaaagctacggtaatccggtggagcagacctggcagaaggtgtatcaggcgtatcaggaagcgtgtgaccgcgcgggcctggtggacttcgccgagctgctgctgcgcgctcacgagttgtggcttaacaagccgcatatcctgcaacactaccgcgaacgttttaccaatatcctggtggacgaattccaggataccaacaacattcagtacgcgtggatccgcctgctggcgggcgacaccggcaaagtgatgatcgtcggtgatgacgaccagagtatctacggctggcgcggggcgcaggtggagaatattcagcgtttccttaatgatttccccggtgccgaaactattcgtctggagcaaaactaccgctctaccagcaatattctgagcgccgctaacgccctgattgaaaacaataacgggcgtctgggtaaaaaactgtggaccgatggcgcggacggtgagcctatttccctctattgcgcttttaacgaactcgatgaagcgcgttttgtggttaaccgcatcaaaacctggcaggacaacggcggagcgcttgccgagtgcgccattctctaccgcagcaacgcccagagccgggtgctcgaagaggcgttattgcaggccagtatgccgtaccgtatttacggcgggatgcgcttcttcgaacgccaggaaatcaaagatgcgctcagctatctgcgcctgattgccaaccgcaacgacgacgcggcctttgagcgtgtggtgaatacgccaacgcggggtattggtgaccggacgctggacgtggtacgtcagacaagccgcgatcgccagttaacactctggcaggcatgtcgtgagctgttgcaggaaaaagccctcgccgggcgagctgccagcgccttgcagcgatttatggaattaatcgacgccttagcgcaggaaactgccgatatgccgctgcatgtacagactgaccgggtaattaaagactccggcctgcgtaccatgtatgagcaggagaagggcgaaaaaggtcagacgcgtatcgaaaacttagaggaactggtgacggcaacgcgccagttcagctacaacgaagaagacgaagatttaatgccgctgcaggcgttcctctcccatgcggcactggaagcaggtgaagggcaggcggatacctggcaggatgcggtgcagttgatgacgctacacagcgcgaaaggcctggagttcccgcaggtgtttatcgttggtatggaagagggcatgttcccaagccagatgagcctggatgaaggcgggcgtctggaagaagaacgccgtctggcctacgttggcgtaacccgcgcgatgcagaaactgacgctgacctacgcggaaacccgccgtctgtatggtaaagaggtttaccatcgcccgagccgctttatcggcgagctgccggaagagtgtgtggaagaggtgcgcctgcgcgccacggtaagccgcccggtcagccatcagcggatgggtacgccgatggtcgagaacgacagcggctacaagctcggccagcgcgtacgccacgctaagtttggtgaaggcaccattgtcaatatggaaggcagcggtgagcatagccgtttgcaggtggcatttcagggccagggtattaaatggctggtggcggcatacgcccggctggagagcgtgtaacgttgccggatgcggtgctgcgcaccttatttggcctaaaaaatcattcagattcaataaattgcaacgtcatgtaggccggatagggcgtttacgccgcatccggcatctgcgccatcttcagtatctgacacaaaactatcgttttaacctttccgctcgacggaaatcatggtgacaaaaggatagcgttgccacgggattgccccgcctttcatatacatatgactaatcgtgccatcaagataaagcagctgctcaacgttcagtttcgctttggcataacaggcaaaatcataaaaatttgttgcctgctggctcaacaaaaacacggcgttcccatgtttattaatcccaacaccgttacgaattttgctactggcgacgttgggatgaatacgcggattaattacaccgttttccatcaacattggcccactctgcaccgcaaactgaatctctttactggttttgaaggcatccagacgaacgatgccgactttatctcccgcgacataaaacacgccgccaggacggataaagaaattcccttcaccactagcgagatttaacgccaccttctgctgaccgttttcgatgtacaaaccgagcggcgcatagctttcatcatagatgccgccgttcatcgccatctgcacctgaccctgactattaatatccgccagcagagcatgtaacgttccccacgcttcgccattggctttttgccagtacattttcacccgctctgtttgaggattaacggtatacgcctgtacggtcagcgtcggatcactgagtgcgcaatcatcagcggcaacagcaaacaagggaggtaaggtgagggcgagaaaaatccgtttgagattcaaggtgatcattcctttaccaatgagtagctgatgcgccattataggtcctggatgtgggatttttttatcctgttagcgaccttgacgagtaccaaaaagcgcgaagttcaactattgttctgtggtgttctgttgcgtgttgacggcaaaattttgctggcgtaacatgcgcgcacgatcactctaagaggacattcgccttggacacacccagtagatactggctcactatcctgtcatccaggatcaactcctaaggctatccctttttgctgatagccttagcggttgtcagcgacctcaatttttcccgtcgcgctgagtcaggctgtttaatggtctgaaacccaatttgtttctgtgtgcccaccgaactgtccgatattttaagcattgggagtcccggtcatgctgagcgcatttcaactggaaaataaccgactgacccggctggaagtcgaagagagtcaaccccttgtaaatgcagtatggattgatcttgtcgaaccggacgacgacgagcgactgcgcgtacaatctgaacttggccagagcctggcaacccgcccggaactggaagacatcgaagcaagcgcacgtttctttgaagacgacgacggcctgcatattcactccttcttcttctttgaagatgcggaagatcacgccggtaactccactgtggcatttaccatccgtgatggtcgtctgtttactctgcgtgagcgtgaactgcccgcttttcgtctgtatcgtatgcgtgcccgtagccagagcatggtagacggtaacgcctacgagttgctgctggatctgttcgaaaccaaaatcgaacagttggcagatgaaattgaaaatatctatagcgacctggagcagttgagccgggtgattatggaagggcatcagggcgatgagtacgacgaggcgctctccactctggcggaactggaagatatcggctggaaagttcgcctgtgtctgatggatacccagcgcgcgctcaacttcctggtgcgtaaagcgcgtttaccgggtgggcaactggagcaggcgcgtgaaatcctgcgagatatcgaatccctgctgccgcataacgaatccctgttccagaaggtgaacttcctgatgcaggcggcaatgggttttatcaacatcgagcagaaccgcatcatcaaaatcttcagcgtggtatccgtggtattcctgccgccgacgctcgttgcttccagctatggcatgaactttgagtttatgccagaactgaagtggagcttcggctaccctggcgcgattatctttatgatcctcgcgggcctggcaccgtatctgtactttaagcggaagaactggttgtaaaaaacgagagcggtggcttagtctggctaagccacctgttattcaaaggctccaggtatttaacccttttacctctttctcatagaaccatttgttcgtgttaacagcaacataggctgctacggcaattcccagaatgttaacgccaattagtgcaccaacaaatagagatagaataccaagtaatagaactataattgcttttttccataaccccaggacaaataaatatatccaggaacagaagaaagcaatgaaattcatttgaatagttaagcgttgtcttacttttaatgctttaaatgctgctttatattctggtgttgccccccagaatccaggaaaaccatgttgatcataaaaattaaatcggtatttccatttttcacttaaactaccatcgttcatatattccttactcataaatactccataattattgtttactactatcagtaggtgcaagcattagcatactgaaagtggaaaaataacaaatcaaaaaaatcatgctaccattgccactacaggcaaaatcttcggctatcattgtgatgatagagatgatatatactgctaatgtaccaaaaacataagtttttatatagatgaaaccactatcacggagtcgctggcaattcatgttgatgacgagataatggagtacgatggtagagactataacaagaaagcctgcttctccatcgttaaaaaagataataagaaaggcaaaaatgaaatttattaaaataaaactaaatatataacgacgtctggaaatcttaccgttagatgttgggataaatatacgtaacataaattttacatccttgtatgagtctccggtcagcatggcaatatgcccactctcatgcaagagtcggcatattttttcagaatatatttattttttatttggacgttctacgctgcgtataaatcgcatccatcacaaaaattgccagcgccacccaaataaaggcgaaagtcaccatcttatcggcacccggtttttcaccataaaacgtcacagccagcaggaacatcagcgtcgggccaatgtactggaaaaagcctaacgtactgagacgcaagcgcgtggcagcggcggtaaaacacaacagcggtacggtagtgacaataccggcggcgatcagcagtaaattcaggctcatcgggttttgccccatatggctggtactgctgtcggcaatagcaaacaggtaaattgccgccacgggcagcagccacatggtttcgattaacatgccggtttgcgcttcaacggcaatcttcttgcgtaccagaccgtagaaggcaaaactaaatgccagtcccagcgcgataataggtaggctaccaaaagtccacagctggactaacacgccacatatcgccagaatcaccgccagccattgcatccggcggaatcgctcgccgaggaaaatcatccccagcacaatgttcaccagcgggttaataaagtaaccaaggctcgcttccagcatatggtgattgttcaccgcccagataaacagtagccagttgccaccaatcagcacggcagagactgccagcataaaaattttctgtggcgtctgaatcagcgtttttaaataggaccactggcggcaaatgctcatcagcaccaccataaagaaaaagctccagatcacgcgatgcgtcaggatttcatcggcgggcacgtagtaaatcaacttgaagtacgctggcgctataccccaaataaaataagcggcaagagcgagtaatacgccctgccgcgtttgttttgcatccatcgggaatactcatttttaattggtaacagcagtttacctgcttttatgtcttcaacctaccatataggtggcggtggcactggcaatataaagctgttcttcattgtgtaattcaacgcgggcgacggcgactttattgcctgcacgcaacaggctactagtagcagtaaaacgctcgcccctgcctgggcgcagataatcaacgcgaagatcaatggtccccatccggcttagccgctggcgtagttcatcttcactgatggtttcgtggcgggttaaggtacttcccacgcacaccagaccggcggcgacatccagcgcgctcgcaatgaccccgccgtgcaaaatgctttgcgcccagttgcccaccatcattggctgatttttaaaggccagctgtgcgaactctttttcgtaacgctccagttccatccccaatgcgcggttaaatggcatgtgataaacaaacatctcacccactaatttcagggcttgttcagcggtcagtacggcagacatatcatccttacacttcattggttaatgaaatgttgattttatgcttctttgttgttggtttctactttaggaagggataactaacggctatggagttaagtatgtaaaatagcccgcagaaaaatattcaccttatcaataattcgttacggagaacacgaccgatgcggactctgcagggctggttgttgccggtgtttatgttgcctatggcagtatatgcacaagaggcaacggtgaaagaggtgcatgacgcgccagcggtgcgtggcagtattatcgccaatatgctgcaggagcatgacaatccgttcacgctctatccttatgacaccaactacctcatttacacccaaaccagcgatctgaataaagaagcgattgccagttacgactgggcggaaaatgcgcgtaaggatgaagtaaagtttcagttgagcctggcatttccgctgtggcgtgggattttaggcccgaacagcgtgttgggtgcgtcttatacgcaaaaatcctggtggcaactgtccaatagcgaagagtctagtccgtttcgtgaaaccaactacgaaccgcaattgttcctcggttttgccaccgattaccgttttgcaggttggacgctgcgcgatgtggagatggggtataaccacgactctaacgggcgttccgacccgacctcccgcagctggaaccgcctttatactcgcctgatggcagaaaacggtaactggctggtagaagtgaagccgtggtatgtggtgggtaatactgacgataacccggatatcaccaaatatatgggttactaccagcttaaaatcggctatcacctcggtgatgcggtgctcagtgcgaaaggacagtacaactggaacaccggctacggcggcgcggagttaggcttaagttacccgatcaccaaacatgtgcgcctttatactcaggtttacagcggctatggcgaaagcctcatcgactataacttcaaccagacccgtgtcggtgtgggggttatgctaaacgatttgttttgatgaacggttgagtggttggcaaatctggaatccagcatccaggattaccctctcagagactaaaagcattgcagtttctcgcgcaggcgctgaaaatagcgcctgtttttatttcaggcaatcggggtgaatgtggcgcaggcggaagtgttgaatctggagtccggagctaaacaggttttacaagaaacctttggctaccaacagtttcgccccggccaggaagaaattatcgacactgtgctttccggccgcgattgcctcgtcgtcatgcccactggtggcggaaaatccctttgctatcaaatccctgccttattgctaaacggccttaccgtggttgttagtccgctgattagcttgatgaaagatcaggtggatcaactgcaagccaacggcgtggcggcggcgtgccttaacagcacgcaaacccgcgaacagcaacttgaagtgatgacaggctgccgcaccgggcaaattcgtctgctttatatcgccccggaacgcctgatgctggataactttcttgagcatctggcgcactggaatccggtgttattagccgttgatgaagcgcactgtatctcccaatggggccacgatttccgcccggaatatgccgcgctcggtcagttgcgccagcggttcccgacgctgccgtttatggcgctgaccgccacagccgacgacaccacgcgccaggatatcgtgcgcctgctggggctgaacgatccgctgattcaaatcagcagttttgaccgtccgaatattcgctacatgctgatggagaagttcaaaccgctcgatcagttgatgcgctacgtgcaggaacagcgcggtaagagtggcattatctactgcaacagccgcgcgaaagtagaagacaccgctgcgcgcctgcaaagcaagggaattagcgcggcggcctatcatgccgggctggaaaataatgttcgcgccgatgtgcaggaaaaattccagcgcgatgacctgcaaattgtggtggcgacggtggcgttcggcatgggcatcaataaaccaaacgttcgcttcgtggtccactttgatattccgcgcaatatcgaatcctattatcaggaaaccggacgcgccgggcgtgatggcctgcccgcggaagcgatgctgttttacgatccggctgatatggcgtggctgcgccgttgtctggaagagaagccgcaggggcagttgcaggatatcgagcgccacaaactcaatgcgatgggcgcgtttgccgaagcgcaaacttgccgtcgtctggtattgctgaactattttggcgaagggcgtcaggagccgtgcgggaactgcgatatctgcctcgatccgccgaaacagtacgacggtagtaccgatgctcagattgccctttccaccattggtcgtgtgaatcagcggtttgggatgggttatgtggtggaagtgattcgtggtgctaataaccagcgtatccgcgactatggtcatgacaaactgaaagtctatggcatgggccgtgataaaagccatgaacattgggtgagcgtgatccgccagctgattcacctcggcctggtgacgcaaaatattgcccagcattctgccctacaactgacagaggccgcgcgcccggtgctgcgcggcgaatcctctttgcaacttgccgtgccgcgtatcgtggcgctcaaaccgaaagcgatgcagaaaagcttcggcggcaactatgatcgcaaactgttcgccaaattacgcaaactgcgtaaaagcatagccgatgaaagtaatgtcccgccgtacgtggtgtttaacgacgcaaccttgattgagatggctgaacagatgccgatcaccgccagcgaaatgctcagcgttaacggcgttgggatgcgcaagctggaacgctttggcaaaccgtttatggcgctgattcgtgcgcatgttgatggcgatgacgaagagtaatcagcagcataaaaaagtgccagtatgaagactccgtaaacgtttcccccgcgagtcaaatgtatgttgatgttatttctcaccgtcgccatggtgcacattgtggcgcttatgagccccggtcccgatttcttttttgtctctcagaccgctgtcagtcgttcccgtaaagaagcgatgatgggcgtgctgggcattacctgcggcgtaatggtttgggctgggattgcgctgcttggcctgcatttgattatcgaaaaaatggcctggctgcatacgctgattatggtgggcggtggcctgtatctctgctggatgggttaccagatgctacgtggtgcactgaaaaaagaggcggtttctgcacctgcgccacaggtcgagctggcgaaaagtgggcgcagtttcctgaaaggtttactgaccaatctcgctaatccgaaagcgattatctactttggcagcgtgttcagtttgtttgtcggtgataacgttggcactaccgcgcgctggggcatttttgcgctgatcattgtcgaaacgctggcgtggtttaccgtcgttgccagcctgtttgccctgccgcaaatgcgccgtggttatcaacgtctggcgaagtggattgatggttttgccggggcgttatttgccggatttggcattcatttgattattagccggtgatgccagacgcgtcttcagagtaagtcggataaggcgtttacgccgcatccgacattatttttcacgcatgcctcgcgcttgctaacagcgctcccaccagcataaacaagctgccgaaaatcttattcagcgccttcatctgctttggtcctttaatccatagagcaatccgttgagcaagggtggcgtaaccgatcatcacaataatatcgaccacaatagtggtgacgccgagcacgatatactgcatcagttgcggctgttgcggcatgatgaattgcggaaatagcgccgccagaaacacaatacttttgggattggtgagattcacaaaaactgcgcgctggaacaaatgtcgacggctttgagtagaggccaggcttttaaggtcaattgcaccagcggcgcgccactgctggattcccagccaaatcaagtaagccgcgcctgcccacttcaacacttcaaacgcaatcacactgcgggaaaatagcgtccccaaccccacgccaaccagcacaatatgaatcgccagtccggtctgaagcccagcaatagacgccaccgcgccgcgataaccgtggttgaggctggtggtcatagtgttgattgcaccagagcctgggctcaggcttaaaatgatgcttgtcagcaggtaggcaaaccaccattctaaggtcatgatgaactcccggtgtgtctatttttgtgccacaatacgctactgtcgcagcgttgtgtcaggcacgctaaaaaaaacgattttacgtggtttaagaggcagattacccgatgtttcagcagcaaaaagactgggaaacaagagaaaacgcgtttgctgcttttaccatgggaccgctgactgatttctggcgtcagcgtgatgaagcagagtttactggtgtggatgacattccggtgcgctttgtccgttttcgcgcacagcaccatgaccgggtggtagtcatctgcccggggcgtattgagagctacgtaaaatatgcggaactggcctatgacctgttccatttggggtttgatgtcttaatcatcgaccatcgcgggcagggacgttccggtcgcctgttagccgatccgcatctcgggcatgttaatcgctttaatgattatgttgatgatctggcggcattctggcagcaggaggttcagcccggtccgtggcgtaaacgctatatactggcacatagcatgggcggtgcgatctccacattatttctgcaacgccatccaggtgtatgtgacgccattgcgctaactgcgccaatgtttgggatcgtgattcgtatgccgagttttatggcacggcagatcctcaactgggccgaagcgcatccacgtttccgtgatggctatgcaataggcaccgggcgctggcgcgcgttgccgtttgctatcaacgtactgacccacagcagacagcgatatcgacgtaacttacgcttctatgctgatgacccaacgattcgcgtcggtgggccgacctaccattgggtacgcgaaagtattctggctggcgaacaggtgttagccggtgcgggtgatgacgccacgccaacgcttctcttgcaggctgaagaggaacgcgtggtggataaccgcatgcatgaccgtttttgtgaactccgcaccgccgcgggccatcctgtcgaaggaggacggccgttggtaattaaaggtgcttaccatgagatcctttttgaaaaggacgcaatgcgcagtgtcgcgctccacgccatcgttgattttttcaacaggcataacagtcccagcggaaaccgctctacagaggtttaaatttcttatgtaccaggttgttgcgtctgatttagatggcacgttactttctcccgaccatacgttatccccttacgccaaagaaactctgaagctgctcaccgcgcgcggcatcaactttgtgtttgcgaccggtcgtcaccacgttgatgtggggcaaattcgcgataatctggagattaagtcttacatgattacctccaatggtgcgcgcgttcacgatctggatggtaatctgatttttgctcataacctggatcgcgacattgccagcgatctgtttggcgtagtcaacgacaatccggacatcattactaacgtttatcgcgacgacgaatggtttatgaatcgccatcgcccggaagagatgcgcttttttaaagaagcggtgttccaatatgcgctgtatgagcctggattactggagccggaaggcgtcagcaaagtgttcttcacctgcgattcccatgaacaactgctgccgctggagcaggcgattaacgctcgttggggcgatcgcgtcaacgtcagtttctctaccttaacctgtctggaagtgatggcgggcggcgttagtaaaggccatgcgctggaagcggtggcgaagaaactgggctacagcctgaaggattgtattgcgtttggtgacgggatgaacgacgccgaaatgctgagcatggcggggaaaggctgcattatgggcagtgcgcaccagcgtctgaaagaccttcatcccgagctggaagtgattggtactaatgccgacgacgcggtgccgcattatctgcgtaaactctatttaagctaatcgttctttatttggtcagttgtcaacctgatacttcgctacaatggatacccgttaatcaaagagttttccattgtggcgctacttatcatcaccacgattctgtgggccttctcctttagcttttatggcgagtaccttgcggggcacgtcgatagctattttgcggtgctggtgcgcgttggcctggcggcactcgtttttctgccgtttctgcgtacccgtggcaatagcctgaaaacggtcggcctgtatatgctggtgggcgcgatgcagcttggcgtgatgtatatgctgagtttccgcgcttatctctacctgacggtttccgagctgctgctgttcaccgtgctgacgccgctctacatcacgctgatttatgacatcatgagtaagcgccgtctgcgctggggctatgcctttagcgccttgctggcggtgattggtgccgggattattcgctatgatcaggtcaccgaccatttctggactggcttgctgctggtgcaactctccaatatcacttttgccattggcatggtgggttacaaacgcctgatggaaactcgcccgatgccacagcataacgcctttgcgtggttctatcttggcgcgtttctggtggcagtgattgcatggttcttgctgggaaatgcgcagaaaatgccgcaaaccacgctgcaatggggcattctggtgtttcttggcgtggtggcttccgggattggctactttatgtggaactacggcgcgacgcaggtggacgccggaacgctgggcattatgaataatatgcacgttccggcagggctgctggtaaacctggctatctggcaccaacagccgcactggccaacgtttattacaggcgcgctggtgatcctggccagtctgtgggtgcatcgtaagtgggtcgctccgcgctctagtcaaacggcagatgatcgcaggcgtgattgcgcgctgagcgaataattacaggcgcgctggacttcctggcctcactgtgggtgcatcgtaagtgggtcgctccgcgctcttcacaaacggcagatgatcgcaggcgtgattgcgcgcactgcgaataaacgcttccgtaactggctgacgctgctcgccatcgcgcacggcggcgtacagtcggctccacaagccttcgcccagggttttggtcaccaccagaccctggcgctcaaaactctctactacccaatgcggtagcgcggcaatacccatccgcgcggcaaccatctgaatcaacaataaggtgttatcgacgcttttcagactcgggctgacgcctgccggctgaagaaaatgccgccagacatccagtcgactacgctgcaccggataaattaatagcgtctcgctggcgagatcttccggtgtaattcgcgttttcgccgccagtggatggtcaggtgctaacaccagacgcacttcatagtcgaacatcgggctataatgcaggccactgcgcggcagaatatcggacgtcattaccagatccagctctccctgttgcaaggcgggctgcgggtcaaatgtcacgccgcttttaaaatccatctctacctgcggccagttcttatggaaattttctaacgcgggtgtcagccactgaatacagctatggcactcaatggcaatgcgcagacgcgtctgctgcggttcattgcaggcttgcagggcctggctaatttgcggcagtacctggtttgccagttgcaacaggatttctccctgcggtgtaaagcgtagcggctggctcttacgcacaaatagccggaagccaaggcgttgttccagatcgctaaactggtgagacagggcggattgcgtctgatgcaacgtcgccgcagcggctgcgaggctgccgcagttccgcaacgcttgtagcgttttcaggtgttttacttcgatcatgaaagtccttcacttcggcatgaataatttgcgcttgaggaatatacagtaaccgccaattatggatgtgtaaacatctggacggctaaaatccttcgtcttttaaatttatggtgcgttggctgcgtttctccaccccggtcacttacttcagtaagctcccggggatgaataaacttgccgccttccctaaattcaaaatccataggatttacatataattagaggaagaaaaaatgacaatattgaatcacaccctcggtttccctcgcgttggcctgcgtcgcgagctgaaaaaagcgcaagaaagttattgggcggggaactccacgcgtgaagaactgctggcggtagggcgtgaattgcgtgctcgtcactgggatcaacaaaagcaagcgggtatcgacctgctgccggtgggcgattttgcctggtacgatcatgtactgaccaccagtctgctgctgggtaacgttccggcgcgtcatcagaacaaagatggtagcgtagatatcgacaccctgttccgtattggtcgtggacgtgcgccgactggcgaacctgcggcggcagcggaaatgaccaaatggtttaacaccaactatcactacatggtgccggagttcgttaaaggccaacagttcaaactgacctggacgcagctgctggacgaagtggacgaggcgctggcgctgggccacaaggtgaaacctgtgctgctggggccggttacctggctgtggctggggaaagtgaaaggtgaacaatttgaccgcctgagcctgctgaacgacattctgccggtttatcagcaagtgctggcagaactggcgaaacgcggcatcgagtgggtacagattgatgaacccgcgctggtactggaactaccacaggcgtggctggacgcatacaaacccgcttacgacgcgctccagggacaggtgaaactgctgctgaccacctattttgaaggcgtaacgccaaatctcgacacgattactgcgctgcctgttcagggtctgcatgttgacctcgtacatggtaaagatgacgttgctgaactgcacaagcgcctgccttctgactggttgctgtctgcgggtctgatcaatggtcgtaacgtctggcgcgccgatcttaccgagaaatatgcgcaaattaaggacattgtcggcaaacgtgatttgtgggtggcatcttcctgcagcttgctgcacagccccatcgacctgagcgtggaaacgcgtcttgatgcagaagtgaaaagctggtttgccttcgccctacaaaaatgccatgaactggcactgctgcgcgatgcgctgaacagtggtgacacggcagctctggcagagtggagcgccccgattcaggcacgtcgtcactctacccgcgtacataatccggcggtagaaaagcgtctggcggcgatcaccgcccaggacagccagcgtgcgaatgtctatgaagtgcgtgctgaagcccagcgtgcgcgttttaaactgccagcgtggccgaccaccacgattggttccttcccgcaaaccacggaaattcgtaccctgcgtctggatttcaaaaagggcaatctcgacgccaacaactaccgcacgggcattgcggaacatatcaagcaggccattgttgagcaggaacgtttgggactggatgtgctggtacatggcgaggccgagcgtaatgacatggtggaatactttggcgagcacctcgacggatttgtctttacgcaaaacggttgggtacagagctacggttcccgctgcgtgaagccaccgattgtcattggtgacattagccgcccggcaccgattaccgtggagtgggcgaagtatgcgcaaagcctgaccgacaaaccggtgaaagggatgctgacggggccggtgaccatactctgctggagcttcccgcgtgaagatgtcagccgtgaaaccatcgccaaacagattgcgctggcgctgcgtgatgaagtggccgatctggaagccgctggaattggcatcatccagattgacgaaccggcgctgcgcgaaggtttaccgctgcgtcgtagcgactgggatgcgtatctccagtggggcgtagaggccttccgtatcaacgccgccgtggcgaaagatgacacacaaatccacactcacatgtgttattgcgagttcaacgacatcatggatagcattgcggcgctggacgcagacgtcatcaccatcgaaaccagccgttccgacatggagttgctggagagctttgaagagtttgattatccaaatgaaatcggtcctggcgtctatgacattcacagcccaaacgtaccgagcgtggaatggattgaagccttgctgaagaaagcggcaaaacgcattccggcagagcgcctgtgggtcaacccggactgtggcctgaaaacgcgcggctggccagaaacccgcgcggcactggcgaacatggtgcaggcggcgcagaacttgcgtcgggggtaaaatccaaaccgggtggtaataccacccggtcttttctcattacaggctcttcttcccaccatactgcttaaaccattccagcatacgctgccagccatcttctgcagatgcggcatgatagctcgggcgataatcagcgttgaatgcatgcccggcgtccgggtacacgataatctctgctttcgcattagcagcccgcagcgcctggcgcatggtttcaacgctctcctgcggaatgctgttatcctgaccaccatataagccgagaatcggcgcgttaagatcggttgcgatatcaacaggttgtttcggactattcaggctcttgtcgcccgtcagtttgccgtaccacgccactgcggcttttagctgtggattatgcgcggcatacagccaggtgatacgtccaccccagcagaatccggtgatcattaaacgatgaacatcgccgccgttgcgggaagcccaactggcgacatgatcgagatcggccagcacctggctgtcaggcacttttgctaccagaccgctaagcaacgtggggatatcggcaaaatcattcggatcgccttcgcggaagtaaagttcaggtgcgatagccagatacccctccagcgccagacggcgacaaatgtcgcggatatgttcatgcacgccaaaaatttcctgcactacaatgaccactggcagtgggccatcgctttgctttggtctggcatggtaagcaggcatgttatccccttgactagggatagaggtgaagcccgccacaatcgcgtcgtccggggtctgaacgatggtgctagcgagagggcttgcagcaggtgcaaatccagattgttgtgttgttgccatggtattctccgtacccttataaaaatgttgcgcaatgttaactatagtcagcatgcaacaaatcacattgcctgaatcggctcatcttttatgcagtcctgcagaatgaagggtgatttatgtgatttgcatcacttttggtgggtaaatttatgcaacgcatttgcgtcatggtgatgagtatcacgaaaaaatgttaaacccttcggtaaagtgtctttttgcttcttctgactaaaccgattcacagaggagttgtatatgtccaagtctgatgtttttcatctcggcctcactaaaaacgatttacaaggggctacgcttgccatcgtccctggcgacccggatcgtgtggaaaagatcgccgcgctgatggataagccggttaagctggcatctcaccgcgaattcactacctggcgtgcagagctggatggtaaacctgttatcgtctgctctaccggtatcggcggcccgtctacctctattgctgttgaagagctggcacagctgggcattcgcaccttcctgcgtatcggtacaacgggcgctattcagccgcatattaatgtgggtgatgtcctggttaccacggcgtctgtccgtctggatggcgcgagcctgcacttcgcaccgctggaattcccggctgtcgctgatttcgaatgtacgactgcgctggttgaagctgcgaaatccattggcgcgacaactcacgttggcgtgacagcttcttctgataccttctacccaggtcaggaacgttacgatacttactctggtcgcgtagttcgtcactttaaaggttctatggaagagtggcaggcgatgggcgtaatgaactatgaaatggaatctgcaaccctgctgaccatgtgtgcaagtcagggcctgcgtgccggtatggtagcgggtgttatcgttaaccgcacccagcaagagatcccgaatgctgagacgatgaaacaaaccgaaagccatgcggtgaaaatcgtggtggaagcggcgcgtcgtctgctgtaattctcttctcctgtctgaaggccgacgcgttcggccttttgtatttttgcgtagcgcctcgcaggaaatgcctttccaactggacgtttgtacagcacaattctattttgtgcgggtaagttgttgcgtcaggaggcgttgtggatttcagtatcatggtttacgcagttattgcgttggtgggtgtggcaattggctggctgtttgccagttatcaacatgcgcagcaaaaagccgagcaattagctgaacgtgaagagatggtcgcggagttaagcgcggcaaaacaacaaattacccaaagcgagcactggcgtgcagagtgcgagttactcaataacgaagtgcgcagcctgcaaagtattaacacctctctggaggccgatctgcgtgaagtaaccacgcggatggaagccgcacagcaacatgctgacgataaaattcgccagatgattaacagcgagcagcgcctcagtgagcagtttgaaaacctcgccaaccgtatttttgagcacagcaatcgccgggttgatgagcaaaaccgtcagagtctgaacagcctgttgagcccgctacgtgaacaactggacggtttccgccgtcaggttcaggacagcttcggtaaagaagcacaagaacgccataccctgacccacgaaattcgcaatctccagcaactcaacgcgcaaatggcccaggaagcgatcaacctgacgcgcgcgctgaaaggcgacaataaaacccagggcaactggggcgaggtagtattgacgcgggtgttggaggcttccggtctgcgtgaagggtatgaatatgaaacccaggtcagcatcgaaaatgacgcccgcagccggatgcagccggatgtcatcgtgcgcctgccgcagggaaaagatgtggtgatcgacgccaaaatgacgctggtcgcctatgaacgctattttaacgccgaagacgactacacccgcgaaagcgcgctacaggaacatatcgcgagcgtgcgtaaccatatccgtttgctgggacgcaaagattatcaacagctgccggggctgcgaactctggattacgtgctgatgtttattcccgttgaacccgcttttttactggcgcttgaccgccagccggagctgatcaccgaagcgttgaaaaacaacatcatgctggttagcccgactacgctgctggtggcgctgcgcactatcgccaacctgtggcgttatgagcatcaaagccgcaacgcccagcaaatcgccgatcgtgccagcaagctgtacgacaagatgcgtttgttcatcgatgacatgtccgcgattggtcaaagtctcgacaaagcgcaggataattatcggcaggcaatgaaaaaactctctagtgggcgcggaaatgtgctggcgcaggcagaagcgtttcgcggtttaggagtagaaattaaacgcgagattaatccggatttggctgaacaggcggtgagccaggatgaagagtatcgacttcggagcgttccggagcagccgaatgatgaagcttatcaacgcgatgatgaatataatcagcagagccgctaacccattgggagtagttaagccgggtagaaatctagggcatcgacgcccaatctgttacacttctggaacaattttttgatgagcaggcattgagatggtggataagagtcaagaaacgacgcactttggttttcagaccgtcgcgaaggaacaaaaagcggatatggtcgcccacgttttccattccgtggcaagtaaatacgatgtcatgaatgatttgatgagttttggtattcatcgtttgtggaagcgattcacgattgattgcagcggcgtacgccgtgggcagaccgtgctggatctggctggtggcaccggcgacctgacagcgaaattctcccgcctggtcggagaaactggcaaagtggtccttgctgatatcaatgaatccatgctcaaaatgggccgcgagaagctgcgtaatatcggtgtgattggcaacgttgagtatgttcaggcgaacgctgaggcgctgccgttcccggataacacctttgattgcatcaccattagctttggtctgcgtaacgtcaccgacaaagataaagcactgcgtagtatgtatcgcgtgctgaaacccggcggccgcctgctggtgcttgagttcagcaagccaattatcgagccgctgagcaaagcctatgatgcatactccttccatgtgctgccgcgtattggcagtctggtcgcgaacgacgccgacagctaccgttatctggcagaatccatccgtatgcatcccgatcaggataccctgaaagccatgatgcaggatgccggattcgaaagtgtcgactactacaatctgacggcaggggttgtggcgctgcatcgtggttataagttctgacaggagaccggaaatgccttttaaacctttagtgacggcaggaattgaaagtctgctcaacaccttcctgtatcgcagtcccgcgctgaaaacggcccgcagccgtctgctgggtaaagtattgcgcgtggaggtaaaaggctttagcacgagtttgattctggtgttcagcgaacgccaggttgatgtactgggcgaatgggcaggcgatgctgactgcaccgttatcgcctacgccagtgtgttgccgaaacttcgcgatcgccagcagcttaccgcactgattcgcagtggtgagctggaagtgcagggcgatattcaggtggtgcaaaacttcgttgcgctggcagatctggcagagttcgaccctgcggaactgctggccccttataccggtgatatcgccgctgaaggaatcagcaaagccatgcgcggaggcgcaaagttcctgcatcacggcattaagcgccagcaacgttatgtggcggaagccattactgaagagtggcgtatggcacccggtccgcttgaagtggcctggtttgcggaagagacggctgccgtcgagcgtgctgttgatgccctgaccaaacggctggaaaaactggaggctaaatgacgccaggtgaagtacggcgcctatatttcatcattcgcacttttttaagctacggacttgatgaactgatccccaaaatgcgtatcaccctgccgctacggctatggcgatacagtttattctggatgccaaatcggcataaagacaaacttttaggtgagcgactacgactggccctgcaagaactggggccggtttggatcaagttcgggcaaatgttaagtacccgccgcgatctttttccaccgcatattgccgatcagctggcgttattgcaggacaaagttgctccgtttgatggcaagctggcgaagcagcagattgaagctgcaatgggcggcttgccggtagaagcgtggtttgacgattttgaaatcaagccgctggcttctgcttctatcgcccaggttcataccgcgcgattgaaaagcaatggtaaagaggtggtgattaaagtcatccgcccggatattttgccggttattaaagcggatctgaaacttatctaccgtctggctcgctgggtgccgcgtttgctgccggatggtcgccgtctgcgcccaaccgaagtggtgcgcgagtacgaaaagacattgattgatgaactgaatttgctgcgggaatctgccaacgccattcagcttcggcgcaattttgaagacagcccgatgctctacatcccggaagtttaccctgactattgtagtgaagggatgatggtgatggagcgcatttacggcattccggtgtctgatgttgcggcgctggagaaaaacggcactaacatgaaattgctggcggaacgcggcgtgcaggtgttcttcactcaggtctttcgcgacagctttttccatgccgatatgcaccctggcaacatcttcgtaagctatgaacacccggaaaacccgaaatatatcggcattgattgcgggattgttggcagcctaaacaaagaagataaacgctatctggcagaaaactttatcgccttctttaatcgcgactatcgcaaagtggcagagctacacgtcgattctggctgggtgccaccagataccaacgttgaagagttcgaatttgccattcgtacggtctgtgaacctatctttgagaaaccgctggccgaaattagctttggacatgtactgttaaatctgtttaatacggcgcgtcgcttcaatatggaagtgcagccgcaactggtgttactccagaaaaccctgctctacgtcgaaggggtaggacgccagctttatccgcaactcgatttatggaaaacggcgaagcctttcctggagagctggattaaagatcaggtcggtattcctgcgctggtgagagcatttaaagaaaaagcgccgttctgggtcgaaaaaatgccagaactgcctgaattggtttacgacagtttgcgccagggcaagtatttacagcacagtgttgataagattgcccgcgagcttcagagtaatcatgtacgtcagggacaaagccgttattttctcggaattggcgctacgttagtattaagtggcacattcttgttggtcagccgacctgaatgggggctgatgcccggctggttaatggcaggtggtctgatcgcctggtttgtcggttggcgcaaaacacgctgattttttcatcgctcaaggcgggccgtgtaacgtataatgcggctttgtttaatcatcatctaccacagaggaacatgtatgggtggtatcagtatttggcagttattgattattgccgtcatcgttgtactgctttttggcaccaaaaagctcggctccatcggttccgatcttggtgcgagcatcaaaggctttaaaaaagcaatgagcgatgatgaaccaaagcaggataaaaccagtcaggatgctgattttactgcgaaaactatcgccgataagcaggcggatacgaatcaggaacaggctaaaacagaagacgcgaagcgccacgataaagagcaggtgtaatccgtgtttgatatcggttttagcgaactgctattggtgttcatcatcggcctcgtcgttctggggccgcaacgactgcctgtggcggtaaaaacggtagcgggctggattcgcgcgttgcgtagtctggcgacaacggtgcagaacgaactgacccaggagttaaaactccaggagtttcaggacagtctgaaaaaggttgaaaaggcgagcctcactaacctgacgcccgaactgaaagcgagcatggatgaactacgccaggccgcggagagcatgaagcgttcctacgttgcaaacgatcctgaaaaggcgagcgatgaagcgcacaccatccataacccggtggtgaaagataatgaagctgcgcatgagggcgtaacgcctgccgctgcacaaacgcaggccagtagcccggaacagaagccagaaaccacgccagagccggtggtaaaacctgctgcggacgctgaaccgaaaaccgctgcaccttcccctagcagcagtgataaaccgtaaacatgtctgtagaagatactcaaccgcttatcacgcatctgattgagctgcgtaagcgtctgctgaactgcattatcgcggtgatcgtgatattcctgtgtctggtctatttcgccaatgacatctatcacctggtatccgcgccattgatcaagcagttgccgcaaggtagtacgatgatcgccaccgacgtggccagcccgttctttacgccgatcaagctgacctttatggtgagcctgattctgagtgcgccggtgattctctatcaggtgtgggcatttatcgccccagcgctgtataagcatgaacgtcgcctggtggtgccgctgctggtttccagctctctgctgttttatatcggcatggcattcgcctactttgtggtctttccgctggcatttggcttccttgccaataccgcgccggaaggggtgcaggtatccaccgacatcgccagctatttaagcttcgttatggcgctgtttatggcgtttggtgtctcctttgaagtgccggtagcaattgtgctgctgtgctggatggggattaccagcccagaagacttacgcaaaaaacgcccgtatgtgctggttggtgcattcgttgtcgggatgttgctgacgccgccggatgtcttcagccaaacgctgttggcgatcccgatgtactgtctgtttgaaatcggtgtcttcttcagtcgcttttacgttggtaaagggcgaaatcgggaagaggaaaacgacgctgaagcagaaagcgaaaaaactgaagaataaattcaaccgcccgtcagggcggttgtcatatggagtacaggatgtttgatatcggcgttaatttgaccagtagccaatttgcgaaagaccgtgatgatgttgtagcgtgcgcttttgacgcgggagttaatgggctactcatcaccggcactaacctgcgtgaaagccagcaggcgcaaaagctggcgcgtcagtatagctcctgttggagtacggcgggcgtacatcctcacgacagcagccagtggcaagctgcgactgaagaagcgattattgagctggccgcgcagccagaagtggtggcgactggtgaatgtggtctcgactttaaccgcaactttagcacgccggaagagcaggaacgcgcttttgttgcccagctacgcattgccgcagatttaaacatgccggtatttatgcactgtcgcgatgcccacgagcggtttatgacattgctggagccgtggctggataaactgcctggtgcggttcttcattgctttaccggcacacgcgaagagatgcaggcgtgcgtggcgcatggaatttatatcggcattaccggttgggtttgcgatgaacgacgcggactggagctgcgggaacttttgccgttgattccggcggaaaaattactgatcgaaactgatgcgccgtatctgctccctcgcgatctcacgccaaagccaagttcccggcgcaacgagccagcccatctgccccatattttgcaacgtattgcgcactggcgtggagaagatgccgcatggctggctgccaccacggatgctaatgtcaaaacactgtttgggattgcgttttaaagtttgcggaactcggtattcttcacactgtgcttaatctctttattaataagattaagcaatagcatggagcgagcctcaccatcgggttcggtgaaaatggcctgaaagccttcgaacgcgccttcggtaataatcaccttatcacccggataaggggttgccggatcgacaatgtctttcggtttatatacgcttagctgatgaataaccgcgcttgggactatcgctgggctcgcgccaaagcgcacgaagtggctgacaccgcgggtcgcgttgatagtcgtggtatgaatcacttctgggtcaaattccacaaacaggtagttggggaacaatggctcactgactgcagtacgttttccacgcacgattttttccagggtgatcatcggtgccaggcaattcacagcctgtctttcgaggtgttcctgggcacgttgaagttgcccgcgcttgcagtacagtaaataccaggattgcataatgactcttatccgtttaatcggggcgcaaggatagcaaaagctttacgctaagttaattatattccccggtttgcgttataccgtcagagttcacgctaatttaacaaatttacagcatcgcaaagatgaacgccgtataatgggcgcagattaagaggctacaatggacgccatgaaatataacgatttacgcgacttcttgacgctgcttgaacagcagggtgagctaaaacgtatcacgctcccggtggatccgcatctggaaatcactgaaattgctgaccgcactttgcgtgccggtgggcctgcgctgttgttcgaaaaccctaaaggctacagtatgccggtgctgtgcaacctgttcggtacgccaaagcgcgtggcgatgggcatggggcaggaagatgttagcgcgctgcgtgaagttggtaaattattggcgtttctgaaagagccggagccgccaaaaggtttccgcgacctgtttgataaactgccgcagtttaagcaagtattgaacatgccgacaaagcggctgcgtggtgcgccctgccaacaaaaaatcgtctctggcgatgacgtcgatctcaatcgcattcccattatgacctgctggccggaagatgccgcgccgctgattacctgggggctgacagtgacgcgcggcccacataaagagcggcagaatctgggcatttatcgccagcagctgattggtaaaaacaaactgattatgcgctggctgagccatcgcggcggcgcgctggattatcaggagtggtgtgcggcgcatccgggcgaacgtttcccggtttctgtggcgctgggtgccgatcccgccacgattctcggtgcagtcactcccgttccggatacgcttagtgagtatgcgtttgccggattgctacgtggcaccaagaccgaagtggtgaagtgtatctccaatgatcttgaagtgcccgccagtgcggagattgtgctggaagggtatatcgaacaaggcgaaactgcgccggaagggccgtatggcgaccacaccggttactataatgaagtcgatagtttcccggtatttaccgtgacgcatattacccagcgtgaagatgcgatttaccattccacctataccgggcgtccgccagatgagcccgcggtgctgggtgtcgcactgaacgaagtgtttgtgccgattctgcaaaaacagttcccggaaattgtcgatttttacctgccgccggaaggctgctcttatcgcctggcggtagtgacaatcaaaaaacagtacgccggacacgcgaagcgcgtcatgatgggcgtctggagcttcttacgccagtttatgtacactaaatttgtgatcgtttgcgatgatgacgttaacgcacgcgactggaacgatgtgatttgggcgattaccacccgtatggacccggcgcgggatactgttctggtagaaaatacgcctattgattatctggattttgccagccctgtctccgggctgggtagtaaaatggggctggatgccacgaataaatggccgggggaaacccagcgtgaatggggacgtcccatcaaaaaagatccagatgttgtcgcgcatattgacgccatctgggatgaactggctatttttaacaacggtaaaagcgcctgatgcgcgtttgttttgccctatttatcgatccgacagagaaagcgcatgacaaccttaagctgtaaagtgaccagcgtagaagctatcacggataccgtatatcgtgtccgcatcgtgccagacgcggccttttcttttcgtgctggtcagtatttgatggtagtgatggatgagcgcgacaaacgtccgttcagtatggctagcacgccggatgaaaaagggtttatcgagctgcatattggcgcttctgaaatcaacctttacgcgaaagcagtcatggaccgcatcctcaaagatcatcaaatcgtggtcgacattccccacggagaagcgtggctgcgcgatgatgaagagcgtccgatgattttgattgcgggcggcaccgggttctcttatgcccgcagcattttgctgacagcgttggcgcgtaacccaaaccgtgatatcaccatttactggggcgggcgtgaagagcagcatctgtatgatctctgcgagcttgaggcgcttagcttgaagcatcctggtctgcaagtggtgccggtggttgaacaaccggaagcgggctggcgtgggcgtactggcaccgtgttaacggcggtattgcaggatcacggtacgctggcagagcatgatatctatattgccggacgttttgagatggcgaaaattgcccgcgatctgttttgcagtgagcgtaatgcgcgggaagatcgcctgtttggcgatgcgtttgcatttatctgagatataaaaaaacccgcccctgacaggcgggaagaacggcaactaaactgttattcagtggcatttagatctatgacgtatctggcaaaccatgcccgatgcgacgctgtcgcgtcttatcgtgcctacaaatagtccgaaccgtaggccggataaggcgtttacgccgcatccggcaattggtgcatgatgcctgatgcgacgctgtcgcgtcttatcgtgcctacaaatagtccgaaccgtaggccggataaggcgtttacgccgcatccggcaattggtgcatgatgcctgatgcgacgctggcgcgtcttatcaggcctacattggtgccggatcggtagaccggataaggcgttcacgccgcatccggcaagtggttaaacccgctcaaacaccgtcgcaataccctgacccagaccgatacacatcgtcgccagaccaaactgaacgtctttgcgttccatcagattcagcagcgtggtgctgatacgcgcaccggaacaacccagcggatgacccagcgcgatcgcgccaccgttgaggttgatcttctcgtcaatctgctcaattagtcccagatctttaatacatggcaggatctgcgcggcaaaggcttcgttcatttcaaacacgccgatatcgctggcagaaagccccgcttttttcagcgccagtttgctggccggaaccgggccgtaacccataatgcttgggtcacaaccaacgaccgccatgctacgcacacgagcgcgcggcttaagacctaattcatgggcgcggctttcactcatcaccagcatggcagctgcgccatcggaaagtgcagaagatgtgcccgccgttaccataccgtttactggatcaaacgccggacgcagcgtggcgagggcttccacggtggtttccgggcgaatcacttcgtcgtaattaaactgcttcaggacgccgtcggcatcgtgaccaccggtcgggatgatttcatttttaaatgcggcgctctgcgtggcggcccaggcgcgggcgtgactccgcgcggcaaaggcatcctgcatttcacggctgataccgtgcatacgcgccagcatttctgccgttaagcccatcatgcccgccgctttggcgacattgcggctcaggccggggtgaaaatcgacgccgtgactcatcggcacatggcccatatgctccacgccgccaaccagacatgcctgcgcatcgccagtcatgatcattcgtgctgcgtcatgcagtgcctgcatggaactaccacacaagcgattaacggtaaccgccgggacagagtgtggtacttctgccagcagcgccgcgttacgggcgatattaaaaccctgctccagcgtctgctgcacacaaccccagtaaatatcgtcgagggccgccgcttccagcgccgggttacgcgccagcaggctacgcattaaatgagcggagagatcttctgcacgcacgttacgaaaagcaccgcccttgctacggcccatcggggtgcgaattgcatcgacaatgacaacctgttccattgtgactccttaagccgttttcaggtcgccaaccggacgggctggctcaaccggaggatagtacggttcgttatgacgcgctttattacgcagaccttccggcacttcatacagcgggccgaggtgctgatattgctgtgccatatcgaggtattttgcgctaccgagggtgtccagccagcggaacgcgccgccgtggaacggagggaagcccaggccgtagaccagcgccatatccgcttccgccggagtggcgataatgccttcctccagacagcgcaccacttcgttgaccatcgggatcatcatgcgggcgataatctcttcttcgctgaagtcgcgcttcggctggctcacttctgccagcaggtcttcaacggcggcgtcttcttctttcttcggcttacctttgctgtcttctttataacgccagaaaccgaggccgttcttctgaccaaagcggttggcatcaaacagcgcgtcgatggcatcgcggtaatctttctgcatccgctgcgggaagcctgctgccatgacagcctgagcgtgatgcgcggtatcaatgcccacaacgtccagcagatatgccgggcccatcggccagccaaactgtttttccatcactttgtcgatcttgcggaaatccgcgccgtcgcgcagcagctggctgaaaccggcgaaatacgggaacagcacgcggttaacaaagaagccggggcagtcgttaaccacaatcggcgtcttgcccatcttgctcgcccaggcgacaactttcgcgatggtttcgtcggagcttttctcgccgcgaataatttctaccaacggcattcggtggaccgggttaaagaagtgcatcccgcagaagttttccgggcgttccagcgcgttggccagttcgctgataggaatggtactagtgttagacgccagcacggtatcctggcgtactttttgttcggtttctgccagtacggcttttttcactttcgggttttcaacaaccgcttctaccacaatatccacgcggtcaaatccggcgtagtcgagcgttgggtggattgtggagatcacgccagccagtttcagaccatcgatcttgccgcgctcaagctgcttgttcagcagtttcgcggcttcggtcatgccgagggttaagctcttgtcgttgatatctttcatgacaaccggcacgcctttccacgcagactggtaagcgatgccgccgcccataatgcctgcacccagcaccgcggcctgtttcggggtttcaacgtctttggtgagtttcttcgctttgccttttacatattgatcgttaaggaaaatgccgaccagtgcgcgggcttcgttggtatgcgccagcgggacaaaacttttgttttccaggtttaaggcttcttcacgaccaaaacgggccgcagcttcaatggtttttactgcggtgatgggggccggataatgtttccccgctgtttgtgcgaccatccctttagcgatggtgaagctcatggtggcttcaatcttgctcagttttagtggttccagcttcggctgacgttttgctttccagtcgaggtcgccgttaatggcctggcgtaaaaccgcctttgcgccttcaaccagtttttctgctttgactacgccatccaccagaccgattttcagcgcctgatccgcgccgacatctttaccggcggcaatgatttccagcgcactgtcagcgcccagcatacgtggcatacgtacagaaccgccaaagccaggcatgatgcccagtttggtttccggcagaccgatgcgcagatccggcgtcgccagacgataatcggtcgccagcacgcattcgcagccaccgcccagcgcatagccattgacggcagcaatggtcggcaccggcagatcttccaggcgattaaacacgctattggcaaagtgcagccactgacttaactgttcttcaggaacgaggaacagggacaaaaattcggtgatatcagcaccgacgataaaggctgctttgttgctacgcagcagcagcccttttagatcactttgctgttccagcacgccgatggcctcgccgaggctggcgacggtcgcagtgtcgagtttattaacactacctggggcatcaaataccagttcggcaatgccatcttccagccagtcaaggtacagggtgtcgcctttgtaaagcatgtcagtctcctgaatccgcaaggtgatctggtcgtaccagatgagtcgaagtgtgtattttgtgttaaaaatatgcaaacaaaagattaaagaaatgccgatctgatcacgctcggcagaaatcacgctctggatgaacgatgtgctaagatgcggagacttaaggtcaaaaaaacagaagggtaaaaaatggaaagtctggccagcctctataaaaatcatatagctaccttacaagaacggactcgcgatgcgctggcgcgcttcaagctggatgcgttacttattcactccggcgagctgttcaatgtttttctcgacgatcatccctatccgtttaaagtgaacccgcaattcaaagcgtgggtgccggtaactcaggtgccaaactgctggttgctggtggatggcgtgaacaagccgaaactgtggttctatctgccggttgattactggcacaacgtcgaaccgctgccgacctctttctggactgaagatgtggaagtgatcgcgctgccgaaagccgatggcattggtagcctgctgcctgctgcgcgcggcaatatcggttatatcggtccggtgccggaacgtgcgctgcaactgggtattgaggccagcaacatcaacccgaaaggggttatcgactacctgcattactatcgctccttcaaaactgagtacgaactggcctgtatgcgtgaagcgcagaaaatggcggtcaacggtcaccgcgcggcagaagaagcgttccgttctggcatgagcgagttcgatatcaacattgcctatctgaccgcgaccggtcatcgtgataccgacgtaccttacagcaacattgtggcgcttaacgaacacgctgcggtactgcattacaccaaactggaccatcaggcaccggaagagatgcgcagcttcctgctggatgccggggcagaatataacggctatgcggctgacctgacccgtacctggagcgcaaaaagtgacaacgactacgcgcagctggtgaaggacgttaatgatgaacaactggcgctgatcgccaccatgaaagcaggcgtcagctatgtggattaccacatccagttccatcagcgcatcgccaaactgctgcgtaaacatcaaatcatcaccgatatgagtgaagaagcgatggtcgaaaacgatcttaccgggccgtttatgccgcatggtatcggccatccgctgggcctgcaggtgcatgacgtcgctggttttatgcaggatgatagcggtacgcacctcgcggcaccggcaaaatatccgtacctgcgctgcacccgtattctccagccgggcatggtgttaaccatcgaaccgggtatctacttcatcgaaagcctactggcaccgtggcgtgaagggcagttcagcaagcacttcaactggcagaaaattgaagcactgaaaccgttcggcggcattcgtatcgaagacaacgtggtgatccacgaaaacaacgtggaaaacatgacccgggatctgaaactggcgtgatggaaagctggttaattcctgcggcaccggtcacggtcgttgaagagatcaaaaagagccgcttcataacgatgttggcgcataccgatggcgttgaggcggcgaaagcgtttgttgaaagcgtgcgggcagaacaccccgatgcccggcaccattgcgtggcgtgggtcgcgggtgcgccggatgattctcaacagctgggtttctctgacgacggggagccggcgggaacggcaggtaaaccgatgctcgcccagctaatgggcagcggcgtcggggaaattaccgctgtggtagtgcgctactacggcggcatattgcttggcaccggtgggttagtgaaagcgtatggcggcggcgtgaatcaggcgctgcgccagctaacgacccaacgcaagacgccattaaccgaatatactttgcaatgtgaatatcatcagttaaccggcattgaagcgttgctggggcagtgtgacggcaaaattatcaacagtgattatcaggcattcgttctgctgcgggtggcgcttccggcggcgaaagtggctgaattttccgcaaagctggcggattttagccgtggtagtttgcaattgttagcgattgaagaataatccccacttcgttttgcagaactaaggaagcggcagagatgcattttcgcgccattacccgaatcgttggactactggtcatcttatttagtgggaccatgattatccctgggctggtagcactcatctaccgggatggagcgggccgcgcttttacccagaccttttttgtcgccctcgccattggctctatgctgtggtggccgaaccgcaaagagaaaggcgaacttaaatcccgtgaggggtttctgatagtggtgctgttctggaccgtgctgggtagcgtcggtgcgctcccttttatcttcagcgaaagcccgaacctcacgattaccgatgcgttttttgaatctttctctggcctgaccactacgggagccactacgctggtggggctggatagcctccctcacgccatcctcttttatcgccagatgctgcaatggtttggcgggatggggatcatcgtgttggcggttgcgatactgcctatcctcggcgtgggtgggatgcagctctatcgcgcagaaatgcccggcccgctgaaagataacaaaatgcgcccgcgaattgcggaaacggcgaaaaccctgtggttgatttatgtcttgctgaccgtcgcctgtgcgctggcgttgtggtttgccggaatggatgcctttgatgccatcggccatagctttgcgactatcgctattggcggcttcagcacacatgatgccagtatcggttatttcgatagcccgactattaacactatcattgctatcttcctgctgatctccggctgtaactacggtctgcactttagtctgttaagtgggcgtagtctgaaggtttattggcgcgatccggaatttcgcatgtttatcggcgtacagtttacgctggtggttatttgtaccctcgtactgtggtttcataatgtctacagtagcgcgctgatgacaattaaccaggcgtttttccaggtggtgagcatggcgacaaccgccgggtttacaactgacagcattgcccgctggccgctctttttgccggtactgcttttatgtagtgcctttatcggcggttgcgccgggagtacgggcggtggcctgaaggtgatccgcatcctgctgctgtttaagcaggggaaccgtgagctgaaacgactggtgcatccgaacgccgtctatagcattaagctggggaatcgcgcactgccggaacgtatcctcgaagccgtttggggatttttctccgcctatgcattggtgtttattgtcagtatgctggcgattatcgccacgggcgtggatgacttttctgcctttgcgagcgttgttgcgacattgaataacctggggccagggcttggcgtggttgctgataactttaccagtatgaacccggtggctaaatggatcctgattgccaacatgctgtttggtcgtctcgaggtctttacattgctggtgctctttaccccgactttctggcgtgaatgatggagtaatacgtgaaaacattaattcttttcagtacaagggacggacaaacgcgcgagattgcctcctacctggctagcgaactgaaagaactggggatccaggcggatgtcgccaatgtgcaccgcattgaagaaccacagtgggaaaactatgaccgtgtggtcattggtgcttctattcgctatggtcactaccatagtgcgttccaggaatttgtcaaaaaacatgcgacgcggctgaatagcatgccgagcgccttttactccgtgaatctggtggcgcgcaaaccggagaagcgtactccacagaccaacagctacgcgcgcaagtttctgatgaacagccaatggcgtcccgatcgctgcgcggtcattgccggggcgctgcgttacccacgttatcgctggtacgaccgttttatgatcaagctgattatgaagatgagtggcggtgaaacggatacgcgcaaagaagttgtctataccgattgggagcaggtggcgaatttcgcccgagaaatcgcccatttaaccgacaaaccgacgctgaaataagcataaagaataaaaaatgcgcggtcagaaaattattttaaatttcctcttgtcaggccggaataactccctataatgcgccaccactgacacggaacaacggcaaacacgccgccgggtcagcggggttctcctgagaactccggcagagaaagcaaaaataaatgcttgactctgtagcgggaaggcgtattatgcacaccccgcgccgctgagaaaaagcgaagcggcactgctctttaacaatttatcagacaatctgtgtgggcactcgaagatacggattcttaacgtcgcaagacgaaaaatgaataccaagtctcaagagtgaacacgtaattcattacgaagtttaattctttgagcgtcaaacttttaaattgaagagtttgatcatggctcagattgaacgctggcggcaggcctaacacatgcaagtcgaacggtaacaggaagaagcttgcttctttgctgacgagtggcggacgggtgagtaatgtctgggaaactgcctgatggagggggataactactggaaacggtagctaataccgcataacgtcgcaagaccaaagaggggtaccttcgggcctcttgccatcggatgtgcccagatgggattagctagtaggtggggtaacggctcacctaggcgacgatccctagctggtctgagaggatgaccagccacactggaactgagacacggtccagactcctacgggaggcagcagtggggaatattgcacaatgggcgcaagcctgatgcagccatgccgcgtgtatgaagaaggccttcgggttgtaaagtactttcagcggggaggaagggagtaaagttaatacctttgctcattgacgttacccgcagaagaagcaccggctaactccgtgccagcagccgcggtaatacggagggtgcaagcgttaatcggaattactgggcgtaaagcgcacgcaggcggtttgttaagtcagatgtgaaatccccgggctcaacctgggaactgcatctgatactggcaagcttgagtctcgtagaggggggtagaattccaggtgtagcggtgaaatgcgtagagatctggaggaataccggtggcgaaggcggccccctggacgaagactgacgctcaggtgcgaaagcgtggggagcaaacaggattagataccctggtagtccacgccgtaaacgatgtcgacttggaggttgtgcccttgaggcgtggcttccggagctaacgcgttaagtcgaccgcctggggagtacggccgcaaggttaaaactcaaatgaattgacgggggcccgcacaagcggtggagcatgtggtttaattcgatgcaacgcgaagaaccttacctggtcttgacatccacggaagttttcagagatgagaatgtgccttcgggaaccgtgagacaggtgctgcatggctgtcgtcagctcgtgttgtgaaatgttgggttaagtcccgcaacgagcgcaacccttatcctttgttgccagcggtccggccgggaactcaaaggagactgccagtgataaactggaggaaggtggggatgacgtcaagtcatcatggcccttacgaccagggctacacacgtgctacaatggcgcatacaaagagaagcgacctcgcgagagcaagcggacctcataaagtgcgtcgtagtccggattggagtctgcaactcgactccatgaagtcggaatcgctagtaatcgtggatcagaatgccacggtgaatacgttcccgggccttgtacacaccgcccgtcacaccatgggagtgggttgcaaaagaagtaggtagcttaaccttcgggagggcgcttaccactttgtgattcatgactggggtgaagtcgtaacaaggtaaccgtaggggaacctgcggttggatcacctccttaccttaaagaagcgttctttgaagtgctcacacagattgtctgatgaaaatgagcagtaaaacctctacaggcttgtagctcaggtggttagagcgcacccctgataagggtgaggtcggtggttcaagtccactcaggcctaccaaatttgcacggcaaatttgaagaggttttaactacatgttatggggctatagctcagctgggagagcgcctgctttgcacgcaggaggtctgcggttcgatcccgcatagctccaccatctctgtagtgattaaataaaaaatacttcagagtgtacctgcaaaggttcactgcgaagttttgctctttaaaaatctggatcaagctgaaaattgaaacactgaacaacgaaagttgttcgtgagtctctcaaattttcgcaacacgatgatgaatcgaaagaaacatcttcgggttgtgaggttaagcgactaagcgtacacggtggatgccctggcagtcagaggcgatgaaggacgtgctaatctgcgataagcgtcggtaaggtgatatgaaccgttataaccggcgatttccgaatggggaaacccagtgtgtttcgacacactatcattaactgaatccataggttaatgaggcgaaccgggggaactgaaacatctaagtaccccgaggaaaagaaatcaaccgagattcccccagtagcggcgagcgaacggggagcagcccagagcctgaatcagtgtgtgtgttagtggaagcgtctggaaaggcgtgcgatacagggtgacagccccgtacacaaaaatgcacatgctgtgagctcgatgagtagggcgggacacgtggtatcctgtctgaatatggggggaccatcctccaaggctaaatactcctgactgaccgatagtgaaccagtaccgtgagggaaaggcgaaaagaaccccggcgaggggagtgaaaaagaacctgaaaccgtgtacgtacaagcagtgggagcacgcttaggcgtgtgactgcgtaccttttgtataatgggtcagcgacttatattctgtagcaaggttaaccgaataggggagccgaagggaaaccgagtcttaactgggcgttaagttgcagggtatagacccgaaacccggtgatctagccatgggcaggttgaaggttgggtaacactaactggaggaccgaaccgactaatgttgaaaaattagcggatgacttgtggctgggggtgaaaggccaatcaaaccgggagatagctggttctccccgaaagctatttaggtagcgcctcgtgaattcatctccgggggtagagcactgtttcggcaagggggtcatcccgacttaccaacccgatgcaaactgcgaataccggagaatgttatcacgggagacacacggcgggtgctaacgtccgtcgtgaagagggaaacaacccagaccgccagctaaggtcccaaagtcatggttaagtgggaaacgatgtgggaaggcccagacagccaggatgttggcttagaagcagccatcatttaaagaaagcgtaatagctcactggtcgagtcggcctgcgcggaagatgtaacggggctaaaccatgcaccgaagctgcggcagcgacactatgtgttgttgggtaggggagcgttctgtaagcctgtgaaggtgtgctgtgaggcatgctggaggtatcagaagtgcgaatgctgacataagtaacgataaagcgggtgaaaagcccgctcgccggaagaccaagggttcctgtccaacgttaatcggggcagggtgagtcgacccctaaggcgaggccgaaaggcgtagtcgatgggaaacaggttaatattcctgtacttggtgttactgcgaaggggggacggagaaggctatgttggccgggcgacggttgtcccggtttaagcgtgtaggctggttttccaggcaaatccggaaaatcaaggctgaggcgtgatgacgaggcactacggtgctgaagcaacaaatgccctgcttccaggaaaagcctctaagcatcaggtaacatcaaatcgtaccccaaaccgacacaggtggtcaggtagagaataccaaggcgcttgagagaactcgggtgaaggaactaggcaaaatggtgccgtaacttcgggagaaggcacgctgatatgtaggtgaagcgacttgctcgtggagctgaaatcagtcgaagataccagctggctgcaactgtttattaaaaacacagcactgtgcaaacacgaaagtggacgtatacggtgtgacgcctgcccggtgccggaaggttaattgatggggttagccgcaaggcgaagctcttgatcgaagccccggtaaacggcggccgtaactataacggtcctaaggtagcgaaattccttgtcgggtaagttccgacctgcacgaatggcgtaatgatggccaggctgtctccacccgagactcagtgaaattgaactcgctgtgaagatgcagtgtacccgcggcaagacggaaagaccccgtgaacctttactatagcttgacactgaacattgagccttgatgtgtaggataggtgggaggctttgaagtgtggacgccagtctgcatggagccgaccttgaaataccaccctttaatgtttgatgttctaacgttgacccgtaatccgggttgcggacagtgtctggtgggtagtttgactggggcggtctcctcctaaagagtaacggaggagcacgaaggttggctaatcctggtcggacatcaggaggttagtgcaatggcataagccagcttgactgcgagcgtgacggcgcgagcaggtgcgaaagcaggtcatagtgatccggtggttctgaatggaagggccatcgctcaacggataaaaggtactccggggataacaggctgataccgcccaagagttcatatcgacggcggtgtttggcacctcgatgtcggctcatcacatcctggggctgaagtaggtcccaagggtatggctgttcgccatttaaagtggtacgcgagctgggtttagaacgtcgtgagacagttcggtccctatctgccgtgggcgctggagaactgaggggggctgctcctagtacgagaggaccggagtggacgcatcactggtgttcgggttgtcatgccaatggcactgcccggtagctaaatgcggaagagataagtgctgaaagcatctaagcacgaaacttgccccgagatgagttctccctgactccttgagagtcctgaaggaacgttgaagacgacgacgttgataggccgggtgtgtaagcgcagcgatgcgttgagctaaccggtactaatgaaccgtgaggcttaaccttacaacgccgaaggtgttttggcggattgagagaagattttcagcctgatacagattaaatcagaacgcagaagcggtctgataaaacagaatttgcctggcggcagtagcgcggtggtcccacctgaccccatgccgaactcagaagtgaaacgccgtagcgccgatggtagtgtggggtctccccatgcgagagtagggaactgccaggcatcaaataaaacgaaaggctcagtcggaagactgggcctttcgttttatctgttgtttgtcggtgaacgctctcctgagtaggacaaatccgccgggagcggatttgaacgttgcgaagcaacggcccggagggtggcgggcaggacgcccgccataaactgccaggcatcaaattaagcagaaggccatcctgacggatggcctttttgcattggcgcagaaaaaaatgccggatgcgacgctggcgcgtcttatccagcctactcttgcttatccgttctgcttttgcatccactccaccacaaaatcagccagcccctcaacatcattaatatccagtaatgcgacatcaagattaagcggcacatcactggctacagcaataacatgcctgtctatcactaattcttcaggtcgatgtccggctccatcgcgaaacagcacaatctttgcgatctcttcatgcttaaacccttcgaccagaatcaaatccagcttactggtatccattcgacttgcgagaaactgtagatccagctcttcttcgtctggtgtttccgtcatcaaggcccatcgttgctggctggcaacgatggtttgtaccgcgccagccttgcgcagctcatagctatctttgcctggcttatcaacatccatatcatggtgcgtatgcttaatcagccctggacggatccctctggcgcataatgccgggatcagttttttcaaaagcgtagtttttccggtaccactccacgcggcaaaggcgagtaacggtatcatcgtttttcctgccatcgggcaagctcctctggcgtattcacgttaacaaatgcatctttatgatcgctgaaatcaaccgcatgaccgccagccagacgcataaataccattacccggcgttctcctgcttgcagatattccagtaataaaggctcaatagcgcggtttaccagagcaatagtcgggtgatcgcgttcaccgtcatggacccacacgacaggcgcatctttgcgctgatgattaagcctggctgctaaatcagggggaatgtaaggcgtatcgcacgggcaaaacaaaaaccactcaccagcttcctgctgcattacactaagcattcctgccagagggcctgggtaatccgccagactatcttcaatcactttcagaccgcttgcctgatagatttcctgatgacgattagcattaaccacgacgtgagagagctgcgtcataagcgcgtcagcgacatgttgccataatggtttgccgtttaattcaagcaatcctttatctacgccgcccattcgtctggctttaccgcctgccagcacaacgcctgttatcgtcgtcatcagattcaccgatatcgcctcttttattgtgggattgaccctgctaacgtgtctgtctcaagagtaaggagcatcactatgaaatgtaaacgtctgaatgaagttattgaactcctccagccagcctggcaaaaagagccagaccttaacctgctgcaatttttgcagaaactggcgaaagagagtggttttgacggcgaactggcggatttgacggatgacattctgatctatcacctgaaaatgcgtgattccgcgaaagatgcggtgatcccgggtttgcagaaagattatgaagaagacttcaaaacggcgctgttacgcgctcgcggcgtaattaaagagtaaaagcttgtaagcggcgccaccaaaatcatcgtgaaatgatatccttcgtcattcgtaatgttttccggatgatgggatgaataacagcgcttttactttccagacactacacccggataccatcatggacgctctgtttgagcatgggatccgggtggattccggtcttaccccgcttaacagctatgaaaaccgtgtctatcaatttcaggacgaagatcgtcgacgttttgtcgtcaaattttatcgccctgaacgttggacagccgatcaaatcctcgaagaacatcaatttgcgttgcagctggtaaatgatgaagttccggtcgcagcacctgtggcctttaacggtcagactttattgaatcatcagggattttatttcgctgtttttccaagcgtcggtggtcgccagttcgaagctgataatatcgatcagatggaagcggttgggcgttatttagggcgtatgcaccagacggggcgcaaacagctttttatccatcgcccgaccatcggtttgaacgaatatctcattgagccacgcaagctgtttgaggacgctacactgataccttccgggttgaaagcggcattcctgaaagcgacagatgagctgattgccgccgttacagcacactggcgggaagatttcaccgttctgcggctacatggagactgccacgccgggaatattctctggcgcgatggtccaatgtttgttgatctggatgatgcacgtaatggtccagccgttcaggatttgtggatgttgctcaatggcgataaagccgagcagcggatgcaactggaaactattattgaagcttatgaagaatttagcgagttcgacaccgctgaaatcggactgattgaacctttacgcgccatgcgtttggtttattatcttgcctggctaatgcggcgttgggctgatcccgcgttcccgaaaaatttcccgtggttaaccggggaagattactggctgcgacagacggcgacttttatagaacaggcaaaagttctacaagaaccccctttgcaattaacacctatgtattaatcggagagagtagatcatgaaaaagatttggctggcgctggctggtttagttttagcgtttagcgcaagcgcggcgcagtatgaagatggtaaacagtacactaccctggaaaaaccggtagctggcgcgccgcaagtgctggagtttttctctttcttctgcccgcactgctatcagtttgaagaagttctgcatatttctgataatgtgaagaaaaaactgccggaaggcgtgaagatgactaaataccacgtcaacttcatgggtggtgacctgggcaaagatctgactcaggcatgggctgtggcgatggcgctgggcgtggaagacaaagtgactgttccgctgtttgaaggcgtacagaaaacccagaccattcgttctgcttctgatatccgcgatgtatttatcaacgcaggtattaaaggtgaagagtacgacgcggcgtggaacagcttcgtggtgaaatctctggtcgctcagcaggaaaaagctgcagctgacgtgcaattgcgtggcgttccggcgatgtttgttaacggtaaatatcagctgaatccgcagggtatggataccagcaatatggatgtttttgttcagcagtatgctgatacagtgaaatatctgtccgagaaaaaataattcaatgtaaattacataaagcccgtgaatattcacgggctttttttattatttaataaatataaatacattctgataatgcatcctgccgctggacattatttcagcataagtggatattcaaagttttgctgttttatcagggaatatttatatgatacgtaagagtgctacaggtgttattgttgcgttagccgtaatctggggtggtggcacatggtacacaggtacgcaaattcagcctggtgtcgaaaaatttattaaagattttaacgatgctaaaaagaaaggtgaacatgcctacgatatgacgttaagttatcaaaattttgacaaaggcttttttaattcccgttttcaaatgcaaatgacattcgataacggtgcacccgatctcaatatcaagccaggccagaaagttgtatttgatgtggatgttgagcacggtccgttgcccatcacaatgttaatgcatggtaatgtcatcccagcactggcagcggcaaaagtgaacttagtgaataatgaactgacacaaccgctatttatcgccgcgaaaaataaaagccccgtggaagcgacattgcgattcgcgtttggtggcagtttctctacgacattagatgttgcccctgcagagtatggaaagttttcttttggtgagggccagtttacttttaatggtgatggtagtagtttgtctaacctggatattgaaggcaaagtcgaagatattgttctgcaattaagtccaatgaacaaagtaacggcaaaaagttttaccattgattctctggcgcgattagaagaaaagaaatttccggttggtgaaagcgagagcaaatttaatcagattaacattatcaatcacggggaagacgttgcccaaatcgatgctttcgttgcaaaaaccaggctggatcgcgttaaagacaaagattatatcaatgtcaatctcacctacgaacttgataagttaacaaaagggaatcagcaactcggtagtggtgagtggagtttgattgctgaatctattgatcccagtgcagtgcgccaatttatcatccagtataacattgcgatgcagaagcagcttgctgcacaccctgagttagcaaacgatgaagttgctctgcaagaagtgaatgctgcattgttcaaagagtatttaccgttattacaaaaaagtgagccgaccattaaacaaccggtaagatggaagaacgcactcggcgaactaaatgccaatctggatatcagtattgccgacccagccaaatctagtagttccacaaacaaagatatcaaaagcctcaattttgatgtgaagttaccgcttaatgtcgtcacagaaaccgcaaaacagcttaatttatctgaaggaatggatgcggaaaaagcgcaaaagcaggctgataaacaaatcagcgggatgatgacattaggtcagatgtttcagttaatcacgattgacaacaataccgccagcctgcagctgcgttatacaccgggtaaagttgtttttaacggacaggagatgagcgaagaagaatttatgtctcgtgccggacgttttgttcattaaaatactcactcgcctctgctcattcagaggcgagtaaaacttacttattctgacgctgactactcatgagagacgtcagaagccggtctttttcctgccacaaactgttcagccattgctgaaaatggcgcttaaagcttttgtcattgatgtagtcgccatgtaactcatcggcaataggctgtaaatccacatgtacgacaatccgcgtcagtttaccgcttaacatatcgaagaacggctgacggttattgtccggataacacagcgtaacattaagcagtttatcgaattgtttacccagtacatttagcgccatcgcaatgcctgccgcctttggtggcaacaagttttgaaaagtggagtgggtttgctgatgtttttcttgcgtgaaacgggagccttcaacgaaattgacaatggtggtgggatgcaggcgaaacttttcacaagaacgccgagtggtttcaacatctttaccacgtcgctccggatgacgtaataaataagcgcgggaataacgcttcataaacggcatatccaggctccagcacgccaggccaagaaatggcacccaggccagctgttgcttgaggaaatatttattcatcggaatgtgcttacgaaacagcacgcacagtacgacaacatctgcccaactacggtggttacaaataagcagataccagttcttcttacttaacccttccagcccgtgaacttcccattgaaggtgtgggttcagatgcagtaataccgccagaccttcacaccagcaatacatcataaaatcacaaaaacggctaacctttcgccaaatgactggcacaggtagcaatagttttacaatcccggcaatgatgatcgggacggaacaaaaaatagtgaccaaaatggtcaatacgatactcagcaaaagggttatcgcagcgagtattctcgtcataatgaatttattcaaaaggttagccatagacagtgcgctaaagaagcgcaaggcgcagattttagcagaaaacgacccaaataacggatgatccttaaggagaaaaataattcatatctatccacattagaaaaaatcccattatctcaattattagggatggatttatttttaactgcatgaaaaacaaagacaaacatcatgctgtaaaaagcatgataataaattaaaagcgatgtaaataatttatgcacaaagttatccacatgacgatttgcgagcgatccagaagatctacaaaagattttcacgaaaagcggtgaaaaactcatgttttcatcctgtctgtggcatcctttacccataatctgataaacaggcacggacattatggttcagatcccccaaaatccacttatccttgtagatggtagttcttatctttatcgcgcatatcacgcgtttcccccgctgactaacagcgcaggcgagccgaccggtgcgatgtatggtgtcctcaacatgctgcgcagtctgatcatgcaatataaaccgacgcatgcagcggtggtctttgacgccaagggaaaaacctttcgtgatgaactgtttgaacattacaaaagtcatcgcccgccaatgccggacgatctgcgtgcacaaatcgaacccttgcacgcgatggttaaagcgatgggactgccgctgctggcggtttctggcgtagaagcggacgacgttatcggtactctggcgcgcgaagccgaaaaagccgggcgtccggtgctgatcagcactggcgataaagatatggcgcagctggtgacgccaaatattacgcttatcaataccatgacgaataccatcctcggaccggaagaggtggtgaataagtacggcgtgccgccagaactgatcatcgatttcctggcgctgatgggtgactcctctgataacattcctggcgtaccgggcgtcggtgaaaaaaccgcgcaggcattgctgcaaggtcttggcggactggatacgctgtatgccgagccagaaaaaattgctgggttgagcttccgtggcgcgaaaacaatggcagcgaagctcgagcaaaacaaagaagttgcttatctcagttaccagctggcgacgattaaaaccgacgttgaactggagctgacctgtgaacaactggaagtgcagcaaccggcagcggaagagttgttggggctgttcaaaaagtatgagttcaaacgctggactgctgatgtcgaagcgggcaaatggttacaggccaaaggggcaaaaccagccgcgaagccacaggaaaccagtgttgcagacgaagcaccagaagtgacggcaacggtgatttcttatgacaactacgtcaccatccttgatgaagaaacactgaaagcgtggattgcgaagctggaaaaagcgccggtatttgcatttgataccgaaaccgacagccttgataacatctctgctaacctggtcgggctttcttttgctatcgagccaggcgtagcggcatatattccggttgctcatgattatcttgatgcgcccgatcaaatctctcgcgagcgtgcactcgagttgctaaaaccgctgctggaagatgaaaaggcgctgaaggtcgggcaaaacctgaaatacgatcgcggtattctggcgaactacggcattgaactgcgtgggattgcgtttgataccatgctggagtcctacattctcaatagcgttgccgggcgtcacgatatggacagcctcgcggaacgttggttgaagcacaaaaccatcacttttgaagagattgctggtaaaggcaaaaatcaactgacctttaaccagattgccctcgaagaagccggacgttacgccgccgaagatgcagatgtcaccttgcagttgcatctgaaaatgtggccggatctgcaaaaacacaaagggccgttgaacgtcttcgagaatatcgaaatgccgctggtgccggtgcttagtcgcattgaacgtaacggtgtgaagatcgatccgaaagtgctgcacaatcattctgaagagctcacccttcgtctggctgagctggaaaagaaagcgcatgaaattgcaggtgaggaatttaacctttcttccaccaagcagttacaaaccattctctttgaaaaacagggcattaaaccgctgaagaaaacgccgggtggcgcgccgagtacgagcgaagaggtactggaagaactggcgctggactatccgttgccaaaagtgattctggagtatcgtggtctggcgaagctgaaaagcacctacaccgacaagctgccgctgatgatcaacccgaaaaccgggcgtgtgcatacctcttatcaccaggcagtaactgcaacgggacgtttaagcagtaccgatcctaacctgcaaaacattccggtgcgtaacgaagaaggtcgtcgtatccgccaggcgtttattgcgccagaggattatgtgattgtcagtgcggactacagccagattgaactgcgcattatggcgcatcttagccgtgacaaaggcttgctgaccgcattcgcggaaggaaaagatatccaccgggcaacggcggcagaagtgtttggtttgccactggaaaccgtcaccagcgagcaacgccgtagcgcgaaagcgatcaactttggtctgatttatggcatgagtgctttcggtctggcgcggcaattgaacattccacgtaaagaagcgcagaagtacatggacctttacttcgaacgctaccctggcgtgctggagtatatggaacgcacccgtgctcaggcgaaagagcagggctacgttgaaacgctggacggacgccgtctgtatctgccggatatcaaatccagcaatggtgctcgtcgtgcagcggctgaacgtgcagccattaacgcgccaatgcagggaaccgccgccgacattatcaaacgggcgatgattgccgttgatgcgtggttacaggctgagcaaccgcgtgtacgtatgatcatgcaggtacacgatgaactggtatttgaagttcataaagatgatgttgatgccgtcgcgaagcagattcatcaactgatggaaaactgtacccgtctggatgtgccgttgctggtggaagtggggagtggcgaaaactgggatcaggcgcactaagattcgcctgaacatgccttttttcgtaagtaagcaacataagctgtcacgttttgtgatggctattagaaattcctatgcaacaactgaaaaaaaattacaaaaagtgctttctgaactgaacaaaaaagagtaaagttagtcgcgtagggtacagaggtaagatgttctatctttcagaccttttacttcacgtaatcggatttggctgaatattttagccgccccagtcagtaatgactggggcgttttttattgggcgaaagaaaagatccgtaatgcctgatgcgctatgtttatcaggccaacggtagaattgtaatctattgaatttacgggccggatacgccacatccggcacaagcattaaggcaagaaaattattcgccgtcctgcgtttcttctacaggctgcatctcgctaaaccaggtatccagtttctgccgcagcttgtccacgccttgtttcttcaagctagaaaacgtttcaacctgcacatcaccgttaaacgccagtacagcttcacgcaccatattcaattgcgctttacgtgcgccgcttgccagtttgtccgctttggtcagcagcaccagaacggcgatattgctgtctaccgcccactcaatcatctgctgatccaaatctttcagcggatggcgaatatccattagcaccaccagaccttgcaggctctgacgtttttcgaggtattcgccgagcgcacgctgccatttgcgcttcatctcttccgggacttccgcataaccgtacccaggcaagtcaaccagacgcttgccgtcagccacttcaaacaggttgataagctgggtgcgccctggggttttactggtacgagccaggcttttctggttagtcagcgtgttcagcgcgctggatttacctgcgttggaacggcctgcaaaagccacttcaattccggtatcggaaggtaggtggcgaatatcaggcgcactcatcacaaaatgcgtctgttgataattcaaattagtcaaagcggtcgtctccgtcagtcaaagctttgtggcgattatacctgaaccataataaaaggcggatttttcggcgtgagcgttgtaagtaaaagccatacgctttgtgagacattgccgatagtctttatgcgaaatagcagagaaaattctgcgatgcatgtcaaataagctatataaatcagtgaattgcttttatataaaactctgaaaatgtgcaaatactgatggcggttgattgtttgtttaaagcaaaggcgtaaagtagcacccatagagcgaggacgctaacaggaacaatgactcaggatgagggtcaggagcgccaggaggcgaagacagaggattgtcaggaagacaaacgtccggagacgtaattaaacggaaatggaatcaacacggattgttccggctaaaggaaaaacagggtgtgttggcggcctgcaaggattgtaagacccgttaagggttatgagtcaggaaaaaaggcgacagagtaatctgtcgccttttttctttgcttgctttctgttagattccgccgcaaatctatactgaataaaacggctaaaagacgaaccattatgaaaccaagttctagtaacagtcgcagcaaaggtcatgcaaaagcgcgtcgaaaaacacgcgaggagctggatcaggaagctcgtgatcgcaagcgtcagaaaaaacgtcgtggtcatgcgccgggcagccgcgcagcgggcggaaacaccacgagtggcagcaaaggccagaacgcaccaaaagatccacgtattggcagtaaaacccctattccattgggcgtgactgaaaaagtcaccaaacagcacaaaccgaagagtgagaaacctatgcttagtccgcaggcggagttggaattactggaaacggatgagcgtctggatgcgctgctggaacgtctggaagcaggcgaaaccctgagtgccgaagagcaatcctgggtggatgctaaactggatcgtattgatgagttgatgcagaaactcggcctctcttatgacgatgacgaagaagaggaagaagacgagaagcaagaagacatgatgcgtctgctgcggggcaactaacggattgccgccgtgggccttcccgttctgctgataacccttccggttatatgttatctggtgtggttattcgttaaactacagcggttgtcgcggcgacaaaagtggctgcgcaaccggctgatgacccgaaacgggcatccgccggtacgccgtagccgccagagacgccatcggaaggagtgagcatgtctgtacagcaaatcgactgggatctggccctgatccagaaatataactattccgggccacgatacaccagctacccgaccgcgctggagtttagtgaagacttcggcgaacaggcgtttttacaagccgtggcgcgctatcctgagcgtccattatctctctacgtacatatcccgttctgccataagctttgttacttctgcggttgcaataagattgttactcgccagcagcacaaggccgatcagtatctggacgcgctggagcaagaaatcgtccatcgtgcaccgctgttcgccgggcgtcacgtcagccaattgcactggggcggcggaacgccgacgtatctgaataaagcgcaaatcagccgcctgatgaagctgctgcgcgaaaacttccagttcaatgccgatgcggagattagcatcgaagtcgatccgcgggaaatcgaactggatgtactcgatcatttacgcgccgaaggctttaatcgcctgagcatgggcgtgcaggacttcaacaaagaagtgcaacgtctggttaaccgcgagcaggatgaagagttcatctttgcactgcttaaccatgcgcgtgagattggttttacctccaccaacatcgacctgatttacggcctgccgaaacagacgccggagagtttcgcctttaccctgaaacgtgtggcggagctgaaccccgatcgtctgagtgtctttaactacgcgcatctgccgaccatttttgctgctcagcgcaaaatcaaagatgctgacctgccgagtccgcagcaaaaactcgatatcctgcaggaaaccatcgccttcctgacgcaaagcggctatcagtttatcggtatggatcactttgcccgtccggatgacgagctggcggtggcccagcgtgaaggcgtgctgcatcgtaacttccagggctacaccactcagggcgataccgatctgctggggatgggcgtttccgccatcagcatgattggcgactgctacgcgcagaaccagaaagagttgaagcagtactatcagcaagtggatgaacaaggcaatgcgctgtggcgtggtattgcgctaacgcgtgatgactgtattcgccgcgatgtgattaagagcctcatctgcaacttccgtctggattacgcccctattgagaaacagtgggatttgcacttcgctgattactttgcggaagatctcaagctgctcgccccgttagcaaaagatgggctggtggatgtggatgagaagggaatacaggtgacggcgaaaggtcgcttgctgatccgcaacatttgcatgtgctttgatacctatctgcgccagaaagcgcggatgcagcagttctctcgggtgatttaaatagtgaatggcgcttcgtttacaaagtagaaaacgaaagcgccatcaatgtgctgagaacaagattgcctgatgcgctgggcaacaaaacctgttgaaattattgcttttgtaggccggataaggcgtttacgccgcatcaggcatctgagcatgatgcctgatgcggcgctggtcgcgtcttatcaggcctacgactttctccgcatccggcataaacaacgagcttcagctaaacagcccaatcattgcggcacacagcacggcagcaacggcagtttgcggtgtgtggctgtcaactgcgccactcgataccagattaattattgattccagcataatgactctccccgttttccgggcaagatcatactgaacttatcggaacagtaaagcgtaaaataccagcaatttgcgctcaataatcaatctttacacacaagctgtgaatcactccatccccagctcttttaacttacgcgtcagggtgttgcggccccagccgagtagccgcgccgcttcctgtttatgcccctgcgtatgtcgcaacgcggtcgtcagtaacgtccgctccagctctggctgcgcttcggaaagcagattttgatgaccggaacgcagcgctctgtctgcccactgcgcaagaagcgtcgcccagctgtccggttgcatttggctagtactctccgcaaccgtactttcaaacagttcgccgggcaaatcctgaatcaacacttcctgcccggcggccatcaccgttagccagcggcaggtgttttccagctggcgcacgttgcctggccacgccagacgcgtcagagcagcttcggtttccggatgcagtaacttcgcttctacgcccagttcgcgcgcggcaacctgtaaaaaatggcgcgccagacggggaatatcttcccgacgttcgcgcagcggcggcagatgaacgcggataacgttcaggcggtggaacagatcctcacggaacttaccttcctgcactcgctgttcgagattctggtgagtggcagcgataatccgcacatccactttcaccggcgcatagccgccaacgcggtaaaactgaccgtctgccagcacgcgcagcaaacgcgtctgcacatccagcggcatatcaccaatttcgtcgaggaataatgtaccgccatcggcctgttcaaaacgcccctgacgaatggtattcgcgccagtaaacgcgcctttctcgtggccaaacagttcactttcgatcaaatcttttgggatagctgccatattcagcgcgataaacggcgctttggcgcgcggactgtggcgatgcagggcatgagcgaccagttctttaccggtgccggattcgccgttaatcagcacgctaatagaagaacggctaagccgaccgataatacggaacacgtcctgcatggctggcgcttcgccgatgatatcggtcgttgggccgttaagctgaacattacgcggctgctgctgttcctggtaatgactgatagcgcgctcaaccagcgccactgcttcgtcgatatcaaacggtttgggcagataatcaaacgccccttgttgataggcgctgacggcagcatccagatcggaatgtgcggtcataatgatgaccggaagcattggatggcgctgtttaatctgcttgagcagcgccagcccgtccattcccggcatacggatatcactaagcagcacatccggcgttttgctcgccagcgcctccagcacttctgcgccgttctcaaacgtcgtacaggttaaacctgccccagcgagcgcacgttcaagcacccaacggatggaactatcgtcatcgactacccagactatccctcgttgcataaacgtcacctttatttcctgataggcaggtaaacgctgaactcggtatgccctggccaactggtaaattcaattttgccactatgctgatcaatcaaattacgagcgatggataagccaagcccggtgccaccttcgcggccgctgaccatcgggtaaaacagcgtatcctgcaaatgaggcggaatgcccggcccgttatcttccacatcaatccgcgccgccagccggtagcgctcgccgtgtaaggtcagttgaaacgcggtgcgggtacgcagaatgatttcaccgccttccggccccagcgcctgtagcgcattgcgcacaatattcagcaagacctgttcaatttgatccgggtcgtgcgccagttccggtaggctgggatcgtaatcacgaatcaaccgcacgttgtccggcagttccatgctcaccagcgttaccacgcgttcagccactttgtgaatactttcggtaacgcgcgtaccgggcagctgcggccccaacagacggtcgaccagatttcgcagccggtccgcctgttcgataatcactttggtatattcgagtagacttgggtcaggtaacgctttgctgagcagctgcgccgcgccacgtaaaccgccaagcggatttttaatctcatgtgccaggccgcgcactaaatcacgggcagcaacctgctgggcgtgctgtagctgttcctgacttaagcggcgctggttatccatcggagccatctccagcaggatcatgccgtccggcatacgctgggccgtcacagaaaggatatggctgcgcccgtcgatgaccagcgtcacttcgttatcggtaaaaccttgccccgcctccagactttcttgcatcagctcgatatttaaactgaagtagctcaacagttccggtaacggtgtaccaaacaatttgcgggagctttgggcgagcagttgttgcgcggcagggttggcgtaatggatcgccaggttgtcatcgattaacaaaatactgttaatcaggctgttgaggatctgcccagcatcgggctgcgtgcctgttgccataaagcagtctcctgaacaggttgcaccattttagtgcattatagctttttacggataaaaagcgcgaagcatcagagaattgacggagaaaaaagcccatgcagagatgggctacagatagctgacaaacttcacgttggagagcgactcacctgctccggcctaccacatcatcaccgtgtaggccggataagacgcatttgcgtcgcatccggcgtgatgtgcttgccaccgatcccaggcctgccagagacaggcgaaaagtttccacggcaactaaaacacttagacgctgtagtacagctcaaactctaccggatgcggagtcatacgcacgcggtcatcttcttcgcgacgcagagcgatgtacgcatcaattgcttcgtcagtgaacacgccaccggctttcaggaactcgcggtccagatccagttcgttcagtgcttcttccagagagcctgcaacctgtgggatctctttcgcttcttctggcggcaggtcatacaggtttttgtccatggcttcgcccggatggatcttgttcttgataccatcaagaccggccatcagcagggcagcaaagcacaggtacgggttagctgccggatccgggaaacgtacttcgatacgacgtgctttcggagaagaaaccaccggaatacggatagacgcagaacggttacgcgcagagtaagccagcattaccggtgcttcatagcccgggaccagacgcttataagagttggtggtcgggtttgccagggcgttaatcgctttagcgtgtttgattacgccgccaatgtagtacagcgcctgctcagacagacctgcgtatttgtcgcctgcgaacaggttaacgccgtttttagacagagacatgtggcagtgcataccggagccgttatcaccgaacatcggttttggcataaaggtcgcggttttaccgaagcggtgcgctacgttgtgcacaacatatttgtagatctgaatttcgtcagcttttttggtcatggtattgaagcgggtagccacttcgttctgaccagcagtcgctacttcgtggtgatgggcttcaaccaccagacccatctgttccatcaccagacacatttcagaacgaatatcctgagcgctgtctaccggtggaaccgggaagtaaccgcctttcactgccggacggtgacctttgttaccaccttcgtattgggtggaggagttccatgcgccttcgatatcgtcgatagcaacgtgggaaccggagatagaacttccgaaacggatgtcatcgaacaggaagaattcaggttctggcccgaacagtacggtgtcggcaatgccagtggaacgcaggtaatcttcggcgcgcttcgcaatggagcgcgggtcacggtcatagccttgcagggtgccaggttcaaggatgtcgcaacggataatcagggtggagtcggcgaagaacgggtcaatcactgcggtggatgcgtctggcatcagcaccatgtcggactcgttaatgcctttccagccgccaatgctggagccgtcaaacattttgccttcttcgaagaattcagcattcacctgatgagcagggatagtgacgtgctgttctttacctttagtatcggtgaagcgcaaatcaacaaacttcacttcgtgctcgttcagcatcgtcagtacgtgttcagcggacatactttaactctcctggattggtcatggtcgtcgtggtaacgaaatctgcaattattttggccgtgtcgccgtaaaaaagataaagcgaaatctgtgccaacttttaaattgcccctaaaaggcgttatcatgcgcaccatcgtgcaaaagggctgcaccacgatgtgaatgttgcaccaatatagtgcttcaatggaaacattaagcaccatgttggtgcaatgacctttggataaccctttttatgctccgtgaaagcgatcacaaagggactctgcaatacttgtttgcggaggatgtttgtgatcctgttttgtagtgcgattaatccgtgtacaataacgcgctatttctaatgcctgaggcaaagttgtgatcgaaaaattgcgtaatatcgccatcatcgcgcacgtagaccatggtaaaaccaccctggtagacaagctgctccaacaatccggtacgttcgactctcgtgccgaaacccaagagcgcgtgatggactccaacgatttggagaaagagcgtgggattaccatcctcgcgaaaaacaccgctatcaaatggaatgattaccgtatcaacatcgttgataccccggggcacgccgacttcggtggtgaagttgaacgtgtaatgtccatggtagacagtgtgctgctggtggttgacgcatttgacggcccgatgccgcaaacgcgcttcgtaaccaaaaaagcgtttgcttacggcctgaagccgattgttgttatcaacaaagttgaccgccctggcgcgcgtcctgattgggttgtggatcaggtattcgatctgttcgttaacctcgacgcgaccgacgagcagctggacttcccgatcgtttacgcttctgcgctgaacggtatcgcgggtctggaccacgaagatatggcggaagacatgaccccgctgtaccaggcgattgttgaccacgttcctgcgccggacgttgaccttgacggtccgttccagatgcagatttctcagctcgattacaacagctatgttggcgttatcggcattggccgcatcaagcgcggtaaagtgaagccgaaccagcaggtcactatcatcgatagcgaaggcaaaacccgcaacgcgaaagtcggtaaagtgctgggccacctcggtctggaacgtatcgaaaccgatctggcggaagctggcgatatcgttgcgatcacgggccttggcgaactgaacatttctgacaccgtttgcgacacgcaaaacgttgaagcgctgccggcactctccgttgatgagccgaccgtttctatgttcttctgcgttaacaccagcccgttctgcggtaaagaaggtaagttcgtaacgtctcgtcagatcctggatcgtctgaacaaagaactggtacacaacgttgcgctgcgcgtagaagaaaccgaagacgccgatgcgttccgcgtttctggtcgtggcgaactgcacctgtctgttctgatcgaaaacatgcgtcgtgaaggtttcgaactggcggtatcccgtccgaaagttatcttccgtgaaatcgacggtcgtaaacaagagccgtatgaaaacgtgactctggacgttgaagaacagcatcagggttctgtaatgcaggcgctgggcgaacgtaaaggcgacctgaaaaacatgaatccagacggtaaaggccgcgtacgtctcgactacgtgatcccaagccgtggtctgattggcttccgttctgagttcatgaccatgacttccggtactggtctgctgtactccaccttcagccactacgacgacgtacgtccgggtgaagtgggtcagcgtcagaacggcgtactgatctctaacggtcagggtaaagcggtcgcgttcgcgctgttcggtctgcaggatcgcggtaagctgttcctcggtcacggtgcagaagtttacgaaggtcagattatcggtattcatagccgctctaacgacctgactgtaaactgcctgaccggtaagaaactgaccaacatgcgtgcttccggtactgacgaagccgttgttctggttccgcctatccgcatgactctggaacaagctctggagttcatcgatgatgacgaactggtagaagtgactccgacctctatccgtattcgtaaacgtcacctgacggaaaacgatcgtcgccgcgccaaccgcgcaccgaaagacgattaatttcgttttttagtcataaaaaacctgccagcgatggcaggtttttttttgcctgtcgtgagcgcacaccaatgcgagtatctcccttataagtctgtggttacgtcaatagagagctttgtcacaattatctgcaaagtcatacgccgttaattgctttcttttttggcgtaagcgtaagatgcttcatctggtttaaaccaaaaggattaaacaatggcggagaatcaatccaccgtagaaaatgcaaaagagaaactggatcggtggttgaaagatggcatcaccacgccgggtggaaaactccctagtgaaagagagctgggagaactgctgggcattaaacgtatgacgctgcgccaggcgttgttgaacctcgaggcagaatccaaaatcttccgtaaggatcgtaaggggtggttcgtgacccagccgcgatttaattacagtccggagctgagcgcgagctttcagcgggccgcaattgagcaagggcgagagccttcctgggggtttaccgagaaaaaccgtaccagcgatattcccgagacgctcgcgccactgattgcagtgacgccaagtactgaactctatcgcatcaccggctggggggcgctggaaggacataaagttttctatcacgaaacatatattaatcctgaagttgctccgggctttattgaacaacttgaaaaccacagtttttctgcagtctgggaaaagtgctaccaaaaagagacggtagtaaaaaaattgattttcaaacccgtcagaatgccgggcgatatcagcaagtatcttggcggttctgcgggtatgccagcgatcttaattgaaaagcatcgcgccgaccagcaaggcaatattgtccaaatagatattgaatattggcgatttgaggccgtagacctcatcattaatctgtaagtgttttatggtgacaataaataacgcaagaaagattctacaacgtgtcgacactcttcctctttatttacatgcttatgcctttcatttaaatatgcggctggaaagagtgttgcctgctgatttacttgatatcgcaagtgaaaataatctacgtggcgtcaaaatccatgttctcgatggcgagcgtttttctcttggtaatatggacgataaagaactctctgcctttggggataaagcccgccgtctgaaccttgatattcatattgaaaccagcgccagtgataaggcatctattgacgaagccgtcgccatcgcgttgaaaactggggcaagctccgtacgtttttatccacgttatgaaggtaatttgcgcgacgtattaagcattatcgctaacgacattgcctatgtacgggaaacgtatcaggacagcggcctgacttttacgatcgagcagcatgaagatttaaaaagtcatgagctggtgagcctggtcaaagaaagtgagatggaatctctttccttactgtttgattttgcgaacatgatcaatgcaaatgagcatcccatcgacgctttaaaaacgatggcaccgcatattacccaggtccatatcaaagatgccttgatcgttaaagaaccgggtggcctgggtcataaagcctgtattagtggtcagggtgatatgccgttcaaagcgttattaacgcaccttatctgcctgggtgatgatgagccgcaggtgacggcatatggcctggaagaagaggttgattactatgcgccggcgttccgctttgaagacgaagatgataatccgtggatcccttatcgccagatgagtgaaacaccattgccagaaaatcatttactggatgcgcggttacgtaaagaaaaagaagatgcaattaatcagataaatcatgtgcgtaacgtactacaacaaatcaaacaagaggcaaaccatcttctgaaccactaataagttttaactcatacgcagttaataaaaccattccatatgaatggtcggtatcttattgcctttaaaacagtgattttaaaaatcgcttaggggatgttatgctcacgaaaaagaaatgggcgttatttagtctattaacactgtgtggcggtacaatttataaattaccgagcctgaaagatgcgttttatatcccgatgcaggaatatttccatttgaccaatggtcaaattggtaatgctatgagcgtaaacagttttgtcaccacagtgggcttttttctgtctatttattttgccgataaactaccgcgcagatacaccatgagtttcagtctcattgcgacaggattactgggtgtttatttgacgacaatgccggggtattggggcatcctctttgtctgggcgctatttggcgttacttgcgacatgatgaactggccggtcttgctcaagagcgtaagtcgattgggcaatagcgaacaacaaggtcggttgtttggcttcttcgaaacagggcgtggcattgtcgataccgtggtggcattttctgcgttggcagtatttacctggtttggcagtggcttattaggttttaaagcaggcatctggttctattcccttattgtgattgccgtaggcattattattttctttgtcctgaatgacaaagaagaggcaccgtccgttgaggtgaaaaaagaagacggagcaagcaaaaacaccagtatgaccagcgtgctgaaagacaaaactatctggcttatcgcttttaacgtcttcttcgtttacgcggtttactgtggcctgacattcttcattccattcctgaaaaacatctatctattgcccgttgcgctggtgggggcttacggcatcattaaccaatactgtctgaaaatgattggtggaccgattggtggcatgattagtgataagatcctgaaaagcccaagtaaatatctatgctacacctttatcattagtaccgctgcgctcgtactgttgattatgctgccgcacgaaagtatgccggtctatttagggatggcatgtacgctgggctttggcgcgatagtctttacacagcgagccgtattttttgcacctatcggcgaagcaaaaattgctgaaaataaaacaggtgcggcgatggcgttgggtagctttattggttacgctccggcgatgttctgcttcagtctgtatggctacattctggatttaaatccggggattattggctacaaaatcgtgtttggcattatggcctgcttcgcattcagtggtgcggtggtttccgtaatgctggttaagcgtattagccaacgtaagaaagagatgctggcggctgaagcttaattaatggccggatgtgcttaatccggccaacgaaaaccgtatcaaccgtaggccggataaggcgtttacgccgcatccggcagtttcacatcagaagaaatacttcgtcccgatacggatctggttttgctcgcggtggtacggttcgacgttgcggtctaaccagcgcaattcgaaataagggagccagtgttcattaatacggtaacggaaggtgttagtgatttcccaatgatgatctttcccgttgctactattaaagtcattcactcgcatgaagtaatgtggctcaaatgtataggaaaatttatcggtgattttaaaattccagtaggtgccaatttcataggtgtcattattatccagttccccgctcaaatctgtactactatagttattatggttatagcgatttcgtactgtcagattaaaccatggtacaaatttatagttgacgtccagatacactgcaccaccgctaccgatactcttatcattaattaagccaccgggctggatggttaatttatcggttggtttaaataacggataccagccttcaatttcgttatatccatgttttagttcatcttctcgctgaaagttgtaggtattggttaacataatacccgcgcccatatcgaagttataacccacacgtagcataacctcgccctgatcggaggcaagattatatgcctccctgttttcgacgtatgcgccagcaaatacgctggcagaggtcagagaagataataaaattattgcattaatctttttcataataagtccattttttaaacgtagggaggccgccacccaccaggatggaaatagcggctattgacatttataacgttacggaagccgttttttcttctgtcgccatctctttatttttgcgttggttgatttcctcaataatcaatgcaaaccgtttttcattgagtgtgtaaaagaatcccatcgtcaatgcagcaataattgccagtgcacaaggccagataaaaatgagctgacgcaaaccctgtaatgtcgcatcgctttgcgcgatgttgggaacataaccaatttgcgtcagcataatgcctggcaagaagccagcaagtgcggcagaaattttacgaaagaaggtataaccggtataaacagaaccttcggcacgaataccggttttccattcaccgtaatctacggtatctggtaccagtgcccagttcaggctgtttacaaaggccgtgccaaaaaaggcgacacaagagaacatgacgaaagtgaaagagttacttccccagaaataattcagtatatcacccaccgcccacagcaccatgccagccagataaacctgttttttaccaaaacattttacagttaatggcaccagtaatacgccgatgaggatgcatcccatactgaagaatcccatccagctcaataaattaatatcattcagcacatactgggtgtaatagacctgaatcgccagtttgatattaaatgccgccagggtacacaagttagcaatgcataaaaccagcaatggcggattccgaaatatcgcgcaaaaacttttgagaatactggctttatgtccggttggcgttgtgtccacataatgctctttgacgcctctgtagcacagcatcataaaaataaagccgccaatggagaacataagtgccgcacaggcataaccgacggtactgtcagaaaaaaggctctgcaacggaataaacgccacggtacaaatcaatagccctatggttgcaccaccctggcggtaagccgcgagctgcgcgcgctcattcgggtttttggtaattgccgggatcatcgcaccatagctgcagttcatcagactgtaactaagtccaaacatcataaacagcgcggtggcaatcgtcgttttaaccggcaaacaaaaggtggtggcgataaactggagcgttgcaattaacgccgccggaaccgctgcatataaaataaagggacgaaatttgcctttaggcccaatatttttccggctgtcgagtaaaaatccggtgagcatatcggtaaacgcggtaaaaaacttcgccaccagaaagataatcccgccatagtaagcaggcatccctaattcatcggtataaaatttgaggagatacagagtaccgatgcagagcattaaattgctaccgacgtcgcccataccataggcgattttttcccgcagattcagttttaatgtcagtggattatggtcagacataatcactccttataacgccccgcagggcgtcgtttattattattacgccgtgcgtttacgggcttctatctcttccacaatgcggacatacatcttctcgttcaggctgtagaagcaacccatcgccacaatggtgactaccgccagtgcgcttgggtagatgaagatcaactggcgtaacccttcaatggtgtggtcagcctgtgcgacgttcggcacatagccaatttgcgtcagcatccagccggggaagaaaccagccagcgcctgagacactttgcgaaagaaggtaaaaccggtgtagaccgttccttcgctacgcacgccggtgcgccactcgccgtactcgacggtgtcggaaaccagcgcccagttcaggctgttaacaaacgcactgccaaagaacgccaggcaggagaacgccacgaagctgacgctaccgccgccgaagaaatagttgagcagatcgcccagcacccaaatcagcaggccgccgatataaactttcttcttgccaaaacgtctgacactggcaggcatcaggaatacgccgatgaaaatacagcccatgctgaaaaatcccatatagctcaacaggatgggatcgttaagcacgtactgggtgtaatagacctggatggcgagcttgacgttaaacgcccctaaagtgcagaggttggcaatgcacagaatgaacagcgggcggttacccgcaattgcgcggaaagattgcagcaggcccggcttttgcgccggattagcaggctgggtttcgacataacgctctttcacgccgctgtagcagatccacataaacagcaggccaaacagactaaacagcgtggcggcgaagatatagccaagttgctgattaccttcgataagattcataactggcacgaatcccaccgtgcacagcagcaggcccagcgtagcgccgccctgacgccatgccgccagactggcgcgttcgttggggtttttggtgatagcgggaaccattgcgccgtaggagcagttcatcatgctgaaaaacagtccgtaaagcataaacagaatagtggccatcaccgttttaccggtgacatcaaacggtgtgccgacaaagttggcgatcgccagtaaggtgaccgggaaactcgcatacagaataaaaggacggaacttaccttttggaccgatcttgcgtcgggaatccaacataatgccggtacccatatcggtaaacgcagtaaagaatttactaatcaaaaagataatgccgccataggtgcctggcagccccagaacgtcggtataaaacttcaaaagataaagcgtaccgatatccagcaggatgttagaggccaggtcgccaataccgtaagagagtttctctttaaagggcaggcgtaaagttgctggatcttccgttgtgatgtgactcatgcttgttctccctttgcccatgagtttccccacgggcggatgtgattagatgctttttaagctcgcgaacagtgccgcccattcgctatcggcgcgataaaagaccggcggcttgccgatgggcgcattaacggtaacttccccgccccggaacgcttcacccgtccaggcgtggacccagttatcctccggcagatagagcgtccagtcgctacggccttcttcatgcaccggagcgaccagaatgtcgcgacctaacaggtactgatatttcagggtgtaagtgtgcgcatcgtcttcgtaatgcaggaacagcgggcgcataaccggcaggccggacttcgcattcagcgcgacggcctctttcaggtaaggtttcagggtggtgaagacggtggtcatacgggcgaaatgggcgatggtttctgcgtcgccgtcaaactgccagttgtcgccaggacggttaccttcgtgggtgcgcatcatcggcgtgaaggcgctgaaatcgcaccagcgcagcagcagctctttgctgcgcttcatctcaaacagggtggtgtaaccgccaatgtcgctgtggtgcaggccatgtccggtcattgccaggctcagcgccgccgggacaacgctcgccaggccatcgtcgagactccagtcgacgttctggtcgcccgcccacatcatggtggagtatttctggctaccggtagaaccggcgcgcataaagaaaaggatctcgccgagcttgcccgtttcttcaagggcttcgtagttacacttcgcccacagcgcaggccaggcgttatgcataatttcggcactgacgccgttatgcaagtacgtgtcggtgggcagatactcgccgaagtcagccatccagccgccgcagccgagttcaatcatgttctttttgatcacttccttgaaccaggcgtaggcttctggattagtgagatcgacaacgccgccgtaaaactcgccaaactccaccagatagtcaccgccagaggcatcttttgccagatagccgtgttgtgccgcttcttcgcagagatctttatcgctggcaacatacgggttgatataggccaggaactgcacgccctcctgattccactgcttaatgcgactatccagttgcgggtagttttcgctgttccacttccagttccacatcacgcgtttgccaaaagaggtcatacgaataccggaccagtcctgcgcccagatgccgttgaccttcacgcccgcgttacgcatggtgtccagtttcttctggcacacttccgtcccgccctgaatgccgagcgttactccgtcataaatccagtcgggcagttctggctggcgtcccagcagggcggttaatttttccagcagggaaatgtatgtgtcagcacattcaaaacgcagcgttgctttgtcttcccacagcgccagttcatggtattccggggcactaaagtcgaagttcatatagcaactgttatcaacatggcagtaatacttctgcgtgctgacaaacgtaggctgtgggaagaaagtccagtaatagtcgccgcccgcattttctttgcagtcggcctgccaggtgacataggtttgtttgttgcgaccaacgccttgttcactggtccatagcgggaacggtttgccacgcagatcgaagtaggaaaactgttcgccgcagccgtagatatggtcctctggttgagcggcaaggcgcagccagatacggttgtggttaaggttgtcgttttgtagttccagcaataaacgcccctgatcgtcggcagagatattcagcgtggcgctaatgtcagaaccacggctgaaatgaattaaccaaccatccggactctggctgacgatggcgtcggtaagcgcaattttctcctgtagtttatctttaatgctgaaattaccgcggaacatatcgatatccgctataccactgccaatccataaacaaggattatctttgctatgggttaaaataagacgttgttgaaaatgtagggtaaaactgtcgttattctgatgaaattgaaaatctaataactgtggacgtggcgtatccataactaatctccatagagttgagaacgagattgttgccttcctgttattacaggcttatgtaaaatgattctcataaaactgatatataaaaactttacagaagctgagctgtttttaacttaataaattgaagatacataatgttgcctttagcgagtgaaatgttcttcaatgattttgactgctaatcaatacaagttattttctctgtccgtaaatattaaaaaacaggcggtgcggttttccactttccagtaataataagtcgataccactattaaaggcgttaggcgggcaactcataggttcaactgccagtccctgacgctgtaatttttcaccgctataaacctgcacccagagttgatcggaacaaaggcttacgctaagcgcctgctgtggatgggtaatggtcatttcccacaaatcattagcggttttaaaggtgtggtcgatttttgtcgcggctatttttttcgcctgcgtgaaatttaaatccagctcatcaacgtggtgaagcgttgtcggattcgcgtgctcatcgacggcataaacctggtttgccggaagctggaacagatattcatcaacagatgttaagttgcaggttaaataaggatgaatacccacgccataaggcgctgcgacagtgccgatattctggcttgcgatctcaacggaaagacccgtgtgtgcgttgaggctataaacaacttgactagccagcataaacggatagccgtaactgggcggcagaaaagctgtcagggtaacgctggtggcggttaattcactaatttgccagtctcgccaggcaagcagcccgtgaatagcggctttactactatgttcattaatgggtaactgatattcctgcccctgatagcggtaacagccgttggcgatccggttcggccacggaataagcactttacccagatgcgccagcggcatctcttcgggtttgtgcgggatgactaaatgacaaccctgaaaggttaattcagccagaccagcaccgacggtcacaatggtcgcgtgataatcccccgcggcaagactaacggtctgtccactgcaatgcatattggtgatttgcatacaaggcaccttaattaagctcatacagcctcccgtgaggctgatgtcaaacccaaaaactgcaccggacggtcccctcgcccctttggggagagggttagggagaggggaaaacccgcaccctattttcagatcagttatttcgcattaatatccagcagacccgctgcaaccgctggagccatgccgggcgctaacgggatacgcgggatcaccaggcaatgcagcaggtgataaatatcctgtttgccgtcccagactttggtggtgaccttattgtccgcatccagctcctgccaccaggaaccattttcatagtccatcaggtacttaatgcagtactcccaccatgtttgataccaggtttcatactggcgatcgccagtgacggtgtagagcgcgtaggccgtacccattgcttcgacgataggccaacgtacacgttcgcggaccaccggttttccttcccagtcaacggtataaacaatcccgtccgcgccatcgggtgcccaggcatcgcgcacggtggcgttaaacagacctttggcatcttctagcagccatgctggtggttgttcgcaacgggcttccagggcagcatggatgtgcagcattaaacggccccattcgatccagtggcctggtgtacctccgaacgcgcggaagcgatgcgccgggttatctttgttgtaatccggcagcggattccactgggtatcgaagtgttcgttaacgcgataatgattatttctggcgacgtcgtggataatcacggaagccacgcgaatcgcgcgatccagccattttttgtcgtgagtgacgtcataaacaatcaagaaagcttccaccgcgtgcatattggcattgccgccgcggtactcttcggttttgctgaaggcttcgtcccaggattccaggcacatctgctcttcttcgctccagaaatatttctcgataatttcaatggtgtaatcgagcagcttgcgcgcttccgggtgacccgttgtgacggcgctggcggcacccagcagagcaaagaagtgttgatagccctgtttggaggcatccaccacgccctcgtcattcacgcaggcataccagccgccatattttttatcacgcagtgcgccgttcatggctttgataccgtgatcaaccaagctgtaagcgccaggtcgacccatcgccgcagcaacggaataaacgtgcaacatacgagcggtgatccacagatgggtgcccatctcttctttgatttgccctttattgcctaaccagccaaaaccagtcggcactacggaatttttaccaaaatcaaagatgcggtcggtttcctgttccagccaacggttgtggcttagggtgttaaaccatttcattccttttatcctcatcttagcggcgtttagccatcatttcgtcgacgatatcgccaagttgttgtaatttcggtgcgcaaacgtcacgcagcatcagctcgttgtctggtaaaccgacgacgcttgcccagactgcacggcctgccaggaatccgcttgcgcccgccgtcattgccacgcgtacggcacgcgggaacagtttttcgtcgacaccggaagagaggatcacccatggcatattgatatggtcattcagacgttgactagcacagagaagctcttgttgcggacctttgccataaagcggcatttcaactttgtagaggtcagcgccactgtcgcccagctctttggcggcatcgatgatcgcttgttcgcgatcgaatttatcgccacgacgcggtgggcggacgactggctcaatgatgcttaccagaccgtgactgtggcacagttcgttgaactctttcaccatatccagacgttgctgcgcatcttcatcactacgccacagcaccagcagttttaaggctttgccaccgtcttgtttgatctgtagcggattgattttgcggtcaataaccacgctatcgaccggaataccgttgccaggaatgaactcatcggcggcgacaatcatggcgcaacttttggcaatcgcgttttgctcaaccacctggcggtagcagaattgttgatctaccagaatcgcgctggcataagggctgagggcctttgcagcgttaactttgaaatcagttaaaacgctatcggctaccggagcgggtgccccagccgcggcaaacatcatgcgcatggcttcgcgctgatcgaccgccagcatggcaaaaccgccgcttgcgcgcgtaatgtcgttgatggtgtacttattcattcatttattcctttatccagtcgttacatttttactttggcagtcatcccggcactgacacggacctgttccagaatggcggaccagtcctggcgaccgcgacccgctgcgcgcgcctggctataaacctcccgactggcggcccccagcggcattggcacatgcagctggttggcgacatcaagggcgatgccaagatccttatgggcaagatcgatcatgaaggcgggagaaagatctccgctgaggactttgtttggccaggaagtggtgaagtgacctttaccggcggcggtaccgctcatcactttgacggcaacatcgaagggaagattcagggcttcgcacaaaacggcggcttctgcgctaagcgcattgagcgcgatgctcatgtagttgttgatgagcttaacgcggatccccatgcccggaccgccagcgttgatcaactcactgcccatcgccatcaggatcggtgtggcacgttcaacttgttcagcggtgccgccagccagcagtaacagagtaccggtaatggcatttgcagaagtacggcctaccggaacatccatcatgctgaagcctttggcttgcatatcggcaatcaatttatcggtttgcagcggatggatggtggacatatcaatgaccagcgcatcggtagataagccttcgcaaacgccgttttcaccgaacaacacgttgcgcaccagatcgccattcggcaacatggtaatgataaattcggcatctttagcggcctgcgccgggttggcggcgggagtcgcacctttgtctaccagatgccgcacagcttcggcgttcacatcaaagacgcgaagttgatgcccttgctgcaataaattgctcgccattgggctacccatttgtcctaaaccgataaacgcgattgctgccataaccctctcctgaatacagttatgtcactttttgtcatttatgacatgctttgcttgtctgtttttgatcgtatttgtaatttatcgtcaaaaaattgacagccgtcactttttaaacaattggtgaaattaaaatgaacgcatcccaaaatgtttaaggaatgaccatgattcgtgttgcttgtgtaggtataaccgtgatggatcgcatctattacgtggaagggttaccgacggagagcggtaaatacgtggcgagaaattatacggaagttggtggcgggccagcggcgacggcagcggttgcggcggcaaggctgggggcgcaggtcgattttattggtcgcgtaggtgatgacgacacgggcaacagcctgctggcagagctggaatcctggggcgttaacacccgttacaccaaacggtataaccaggcgaaatctagccaatccgccatcatggtggataccaaaggcgagcggataatcattaactaccccagcccggatctgctgcctgacgcagagtggttggaggaaattgatttctctcagtgggatgttgtgctggcagatgtacgctggcacgacggcgctaaaaaagccttcaccctggcccgtcaggcgggtgtgatgaccgttctggacggggacattacgccgcaggatatcagtgagctggtggcattaagcgatcacgcggcctttagtgaaccgggtctggcgcgcttaacgggcgtgaaagagatggccagtgcgctaaaacaggcacaaacgctcacaaatggtcatgtctatgtgacccagggtagcgcaggctgcgactggctggaaaatggtgggcgtcagcatcaaccggccttcaaagttgatgtggtagataccacaggtgcgggtgatgtttttcacggcgctttggcggtggcgctggcaacaagtggggatttagcggagagtgtccgcttcgccagcggtgtagcggcgttaaaatgcacacgtcccggtggacgagccgggatccctgactgtgatcaaacccgatcttttttgagtctttttgtataaaatgccagggtgatggtttttcgaggaattttcatgagccttaccgaactaaccggtaacccgcggcacgaccaactcctcatgctgatcgccgagcgtgggtatatgaatattgatgagctggcaaatctgctggatgtctccacgcagacggtccgccgggatattcgtaaattaagcgagcaaggcctgattacgcgccatcacggtggcgcgggtcgggcttccagcgtcgttaatacggcgttcgagcagcgtgaggttagccaaaccgaggaaaaaaagcgattgccgaagcggtggcagactatattcctgatggtagtacaatatttatcaccattggtacgactgttgagcatgttgcccgggcgttacttaaccataatcatttgcggataatcaccaacagcctgcgtgtggcgcatattctttaccacaacccgcgctttgaagtgatggtgcccggcggtacgttgcgctctcataatagcgggatcattggccctagtgcggcgtcctttgtggctgattttcgtgctgattatctggtaacaagcgttggggcgattgagagcgatggcgcgttgatggagtttgatgtaaacgaagctaacgtggtgaaaacgatgatggcgcacgcgagaaatattctgctggtcgccgatcacactaagtatcatgctagcgcggcggttgaaattggtaacgtggcacaggtcactgcgctctttaccgacgagctgccgcccgctgcgctaaaaagtcgcttacaagacagccaaattgaaatcattcttccccaggaagacgcgtaaatttttgtgaccgttaacctggcttcataccttgccacatagccaaacccatcctttcccgctacagttaatttcttgtggcgcgaaaggaggcaaaaatgctctatatctttgatttaggtaatgtgattgtcgatatcgactttaaccgtgtgctgggagcctggagcgatttaacgcgtattccgctggcaagccttaagaagagttttcatatgggggaggcgtttcatcagcatgagcgtggggaaattagcgacgaagcgttcgcagaggcgctgtgtcatgagatggctctaccgctaagctacgagcagttctctcacggctggcaggcggtgtttgttgcgctgcgcccggaagtgatcgccatcatgcataaactgcgtgagcaggggcatcgcgtggtggtgctttccaataccaaccgcctgcataccaccttctggccggaagaatacccggaaattcgtgatgctgctgaccatatctatctgagccaagatctggggatgcgcaaacctgaagcacgaatttaccagcatgttttgcaggcggaaggttttagtcccagcgatacggtctttttcgacgataacgccgataatatagaaggagccaatcagctgggcattaccagtattctggtgaaagataaaaccaccatcccggactatttcgcgaaggtgttatgctaaaaaccattcaggacaaagccaggcaccgtacccgtccactatgggcctggctaaaactactctggcaacgcattgatgaggacaacatgacaaccctggcaggtaaccttgcctatgtgagcttgctcagtttagtgccgctggttgccgttgtttttgcgcttttcgccgcttttcccatgttttccgacgtcagcattcagttacgtcactttatttttgccaactttctgcctgctactggcgatgttattcagcggtatatcgaacaatttgttgccaattccaacaagatgaccgccgttggggcgtgcgggctgatcgtcaccgcgttattgttgatgtactccatcgatagcgcgttgaataccatctggcgcagtaaacgagcgcgaccaaaaatttacagcttcgccgtgtactggatgattttaacgctggggccgctgctggcaggggccagtctggcgatcagttcctatttgctctccctgcgctgggcgagcgatctcaatactgtcatcgacaacgtgctgcgtatttttccgttgctgttgagctggatctccttctggttgctgtacagcattgttcctgccatccgcgtacctaaccgcgacgcgattgtcggcgcgtttgtcgccgcactcctgttcgaagcaggaaagaaaggtttcgcgctttatatcaccatgttcccgagttatcagctcatttatggtgtgctggcggtgatccccattctctttgtttgggtctactggacatggtgtatcgtcttgcttggcgcggaaattactgtcactctcggggaataccgcaaactaaaacaagcagctgaacaagaagaagacgacgaaccatgattgcattaattcaacgcgtaacccgtgccagcgtcaccgtggagggagaagtgacgggcgaaattggcgcgggacttttggtgttattgggtgtcgaaaaggatgacgacgaacagaaagcaaaccgtctgtgcgagcgtgtgctcggctaccgcatctttagcgatgccgaaggcaagatgaatctcaacgtgcaacaggcgggcggcagtgtgctggtggtttcccagtttaccctcgccgcagataccgaacgggggatgcgcccaagtttctccaaaggtgcaagtccggatcgcgcagaggcgttatatgactatttcgtcgaacgctgccgtcagcaagagatgaacacgcaaacaggacgcttcgctgcggatatgcaggtaagcctggtcaatgatggccccgtgacattctggttgcaggtatgagccagcttccagggttgagtcgggaaacaagagagagtatcgctatgtatcaccttcgggttccacaaacagaagaagaattagagcgttactatcagtttcgctgggaaatgttgcgtaagcccctgcatcaaccaaaaggtagcgaacgcgacgcgtgggatgcgatggcgcatcaccagatggtcgtcgacgagcagggtaatctggtggcggtaggccgactgtatattaatgccgacaatgaagcgtccattcgctttatggccgttcatcccgacgtgcaggacaaagggttaggcacgctgatggcgatgaccctggagagcgtggcgcgtcaggaaggcgttaagcgcgtgacctgtagcgcccgtgaagacgcggtggagtttttcgccaagctggggtttgttaatcagggagaaatcaccacgccaaccaccacgccgattcgccattttttgatgattaagcccgtcgccactctggatgacattctgcatcgcggcgactggtgcgcgcagctgcaacaggcgtggtacgaacatatcccgcttagtgaaaaaatgggcgtgcgcattcagcaatataccgggcaaaaatttatcactaccatgccagaaaccggcaatcagaatccgcaccatacgctgtttgccgggagtttattcagtctggcgacgctcactggttggggacttatctggctgatgctgcgtgaacgccacctcggcggaacgattattcttgcggatgcgcatatccgctacagcaagccgattagcggtaaacctcatgcggtagccgacctcggtgccttaagcggcgatctcgaccgtctggcgcgcggacgaaaagcacgggtgcagatgcaggtcgaaatctttggcgacgagacgccgggtgcagtgtttgaaggcacgtatatcgttctgcccgcgaagccatttggcccgtatgaagagggcgggaacgaagaagagtaactgatggagaggggcggtgctgcctctctcattcaggtcatttatattagtccttggctatttcggttatattaaataagaactctataaatttttattcttcgttggctccatacgtgtcttgctacatcactgttcaggagcatttaaatattatttgtagaactgagtggcaattatcgcagataatgcttaattcatcatcttagttcatgtttgagcgatttttgatagtcaaaaccccctctggtgccatacttttctcataaatatttttaaaatctatagctaacaaatattatgcaaagataatggactagcatcattgtcagtatcattcatttactgctctgtatgttatgaataattatgttgtatgtttgctcttaaaccgtgggaaggaggctataatggttgccaatattaatctcattaaacaagaaagttattctgttgttaatttagaaaaacaactttcccgaactgttaccaacaaaattataacgatgagcaagtaaagaccggttggtggcagtactgaccggtctgtgatgaaagattaatttcaccttaaatcctggtgctgttaggatgctgacgtttttcggctacaccattcagattatgcaaataaatatctctgaatataatatattcatagcacccataattcatcctgggcgataactaaaccatttttgagtaataaatgaaacaactgcaacactcttattatttctggaaaacgcctcgcaaaaacaaaacaacatgcaaaaatccgctttttttaaatgattttccggcgtaattttcgcacatacattaatgagtaatatatgtaaggtattggtaatggcgatgaatacggtttttcttcatttaagtgaagaggcaattaaacggctgaacaagcttcggggctggcgtaaggttagtcgatctgcaattttacgcgaagcggtagagcaatatctggaacgtcagcaattcccggtgcgtaaagcaaagggaggcaggcaaaagggggaggtagttggtgttgatgatcagtgtaaggagcataaggaatgacaaaaatttttcattcttgaatataaaaaacagatgcccttattctggtattaatacaaggctgttttacttgaacttataataactgcaactgttacatcatatctggaaaacgcctcgcaaaaataaaaaatgatgcgtaaatgagctttctttaaagattcggcaagggtacttttctctccatagattcaaaaatgatattggcgagatatttatgaactctctggcaggtatagatatgggcagaattttactcgatttaagcaatgaggtgattaagcaacttgatgatctcgaggtgcagcgtaatcttcctcgtgcggacctattaagggaagcggtagatcaatacctgataaatcaaagccaaacagcaagaaccagtgttcctggcatctggcaagggtgtgaggaagatggtgtcgaatatcagcgtaagctgcgcgaggaatggtaatgggaaaaaatgatgtcaatcagattgctgacaacgtgcgcgttgttcatgccggatgcggcgtgaacgccttatccggcctacaaagtcgtataaattcaatgtattgcagtttattggtaggcctgataagcgcagcgcatcaggcaatcttacgcttgtcatcagtctcatgcccataaccttattgatgtggtggtgggtaaattgaggccaaaccggcactggcggcatagcttgaggtggtaacgcggaatacgagagatggtgtcgtcacaccctatgagctgtaatccgggcgacctgcgccacccggaaaacgtcagagattactctccttcacccggaaacaggaacgggttgatggaactgcgggcatagccttcttgctccattcgtgcgtccagtaccagagaggcgaggtcatctgctacggcttcgatttttggatctttttcctgatagagaattttcaggtaagtgtcgcagtcatcgcagctttcggctttaatcgcggcctgttcgtcatccaggctccagtaatgcagtttgccgctctgctcgcagttgctgcattttacgcgcactacgtgccattcagtttcacacaggttgcagtgcaggtaacgtagcccctgagtggtgccaatttgcaccatgctggacaccggcatagaaccacaaaccgggcaatattgacgttgctcgccgtattcagcgcgggctttgccggggatcagattggccatctgcgcccagtagaggctcagtgcagcccagataaacggcgctttatcgctgctgacggagctgaaatcagaggcaaacagcgcgctggccatatcttccagctcctgagtgcttgccttctccagattctcaatcactgccagcgccgggccgctcatttcaggtttcagctcagcaatcagcgccatcagcagcttttgccagtgcttatcacgcggcagaacgtgaatatccagcgggggcttgccttgtgcgctggcttctttaatgcgcgcagtcagatccatctccagcggatggtcgtacagcaccacttcctgggcgtgggcgataagcgcagcaaagcgcaggtaatcacccagaggattattttctgccagctcgcgcagacgctcggcgcggcggttgtataaattcttgagccgagggaacaataacggcggaatcatatccgccgtacgtttctcgctactacccagctcatcttgcgggattatgcgaatactcattcagctttcttttccgttgtcttgcggacctcacggtaccagcgcgggtgatgtttcttcgcccaggcgctggtaacccatccttccaccatggcggtaatcgtgcctttcacccaaagggcggcgtagatatgcaccatgataaccacaattaacgccactgcggcaaaactatgcagcattaacgcgaatcggatcaccgggatactgaaagcaggcgcaaaataaggacgccagataatcacgccgctcaccagcagcagaaccaggaaaataatcgccgcccagaaaacgcatttctgaccgaagttataacgcccggtgtcacctacttcctcgttgacgacgatcttacgaatattcttcgcccaaaagatatcatcccgattgattaggttgtgatgccagtaacggaaaaacatgatgatgaagctggcaaacataaccacgccgacaaacgggtgcagaattcgcgccagctgcggtgtgcccatgatttgcatcaaccagttgaaggacgggaacaaaaagcccagcccgctcaccgccgccaggatgaagcagaaggcggtgatccagtggttgatacgttccggcgcggtgtagcgcacgatggtgtcacgtcgtttcatttgcgctcctcgtctttctcttcgtgcagattattctcttcctcatccgcacggttcggaccgacacccacgtagtggaagatactggccgcaaaggtagccgcaaagccaacagccgcgagcggtttccagatgcctttccagaatttcacggtttcgctgatttccgggttctccggcaagccatgatacagatttggcttgtcagcatggtgcagcacgtacatgacgtgtgtaccaccgacgcctgccggatcgtacagacccgcattgtcgtaaccgcgggttttcagctcagcaacgcgctcgctcgccagcgttttcatgctctctttcgtaccgaagtgaatcgcgcccgttgggcaggtcttcacgcaggctggttcttgcccaaccaccacgcggtcaacgcacagcgtacatttgtagacgcggttgtcttccgggttgaggcgcggaatgtcgaacggacagcccgcaatgcaataaccgcagccaatgcactgctcggactggaagtcgacgataccgttggcatactgaataattgcaccttccgccgggcacgctttcaggcagcctggatcggaacagtgcatacagccgtctttgcggatcagccattccagtttgtcgttctgctccacttcgctgaagcgcattaccgtccagcttttggcgcttaaatcattggggttgtcgtacaccccaatgttattgccgacggtatcgcgaatgtcgttccactcactacacgccacctgacaggctttacagccgatacaggtggtaacgtcgatgagtttcgccacttcttcctggaagtcccgcgcctgaggcgcgggggtcagaccgttagtcgcggaacgacgaatgatatcttgagattgataagccatatgtcgtctccgttacaccttttccacattcacaaggaaggacttaaactccggcgtctgcgtgttcgcatcaccaacgaatggcgttaaagtattggcaataaagccttttttagctacgccttcatagccccagtgaatcggaataccgatggtatcgatatctttgccgttcgctttcagcgtgcgaatacgtttggtcaccaccgctttggctttgatatagccacggttggaggagactttcacggtatcgccctgggcaatgccaagtttattcgccaggctctccccgatttccacaaactgctctggctgcaaaatcgcgttcaacagcgcgtgtttggtccagtagtggaagtgctcggtcagacgataggtggttccgacatacgggaacttatcggctttacccaatgcttcggcgtcgtctttaaagatacgtgcagccgggttgctgataacgtttggatgcagcgggttagttcccagcggcgtttcaaacggctcgtagtgttccgggaacggaccttccgccatcttatcgagggcaaacagacgccccatgccttcctgctgcatgataaacggcccgacgccgctacccggaggcgctgcgctgtagtccggaatatcccagccggtccacttagtgccgtcccatttcagcaactgacgcttcggatcccacgggttaccctgcggatctgcggaggcgcggttatacagaatgcggcggttaagcggccatgcccatgcccagcccagcgtgttaccgaggccagacggatcggcgttatcacggcgtgccatctggttgccttccggcgtccagctaccggcgaaaatccagcagccacaggaggttgtaccgtcatcgcgcaattgggcgaagctactaagttgttggcctttcttgacgataaccgcaccggttgccggatcggtaatatcggccagcgccttaccgttgctctccatcgccacttcttcactagatggctcatgcggaatggcgtagttccatgtcatgttcagcacctggtccgggttcgcgccaccctgttcggcatacatcttgcgcaagcgcaggaagataccggagaggatctcgccgtcagtcagcgcaatccccggggcgtccgcacctttccagtgccactgtaaccagcgaccactgttaacgatagaaccgttctcttccgcgaagcaggtgcttggcagacggaacacttcggtctggatcttgctgctgtcaacttcgttcagctcaccgtggttctgccagaagttagaggtttcagtgttcagtgggtcgatggtgacgaggaacttcagtttgctcagacaaccgatcactttgtttttgttcgggaaactggcaacagggttaaagccctggcagatatagccattgaccttgccctctttcatcatctcgaagtattgcaggacgtcgtagcctttatcccacttcggcaaccagtcaaagccccagctattttccgccgtcgctttatcaccaaagaaggccttcatcatagagacgaagaatttcgggtagttgccccagtagtttacctggccttccagcagcggttttggcgtgttggcggtaaggtaggtttgcagatcggtctgcttctcgcttggcagcgtcatgtaacctggcaggctctggctcagcagccccaggtccgtcagcccctgaatattggagtgaccgcgcagggcgttaacgccgccgcctgccatccccatattgccgagcagcagctggatcatcgccatcgtacgaatgttttgcgcaccaacggagtgttgcgtccagccgagggcatacaggaagctggcagttttatcgtgagcactggtttctgcgatgtattcgcagactttcaggaacgcgtcttttggcgtaccacagatgttttcaaccacatctggcgtgtagcgggaaacgtgctgtttcagcaagttccacacgcagcgcggatgttgcagcgtggtatcgcgtttggcgaagccgttttcgtccagttcataagtccaggaggatttatcgtacttgcgtttttccgcgtcgtagccggtgaacaggccatcttcaaagccgtaatcctcacgcacgatcaggctggcgttggtataggcttcggtgtattcgcggttgaatttttcattgttcagcaggtacagcaatacgccactcaggaaagcaatgtcagtaccggaacgaataggggcatagtagtcagctaccgccgccgtacgcgtaaagcgaggatcgatcacaatcagcttcgcgccgttgtgaattttggcttccatcgcccagcggaacccgaccgggtgagcttcagcggcgttaccgcccatcaccacgacgaggttggcgttcttgatgtcgacccagtggttggtcatcgcaccgcgaccaaatgttggagcaagacttgctaccgttggtccgtgtcagacacgcgcctggttgtcgaccgcgagcatacccagcgcgcgggagaatttttgcgttaaatagccggtttcgttactgctcgcggaagcacacagcatcccggtggagagccagcggttaacagtcacgccttcggcgttttgcgcaatgtagttagcatcgcggtcttctttcatcagtttggcgatgcgatcaaacgcctcttcccaactgatttgctgccatttatcagaacctggcgcacggtattccggaaacttcagacggctttcggagtggatgaaatccaccaggccagcgcctttcggacaaagtgcaccgcggttgaccgggtgatccggatcgccttcgatatggaagatagatgctttggcgttttttgctccgtcaccgaggctgtacatcaacagcccacagcctacggaacaataggtgcaggtattacgggtttcgcgggtgcgcagcagtttatactgccgggtttccgcgagtgctacgctgggtgcaaaacccagtgccgctgccgtggtgcctgccataccgccagcgcagatcttaaagaactgccttctgctgacctgcatggattgctccttgtttcgacattgtcacgtcccatttacattcgcttgctgcgtgtgcagggagtgggagttatttttctttgcggaaggggccgcaaaggtccagaattggctcaatttccctccatccaggaagggtttgtaacagaataccataatgttggtgtgtgtgttcttatctggttaagagaaagtgaaaaaaacacagcgaaaagaaatcgaaaatgtgacaaatatcacaggtgttcgtcaaattgagttatggcggcgtgatgatttacaacacccacggttagatgaggtcgcggaagaagttcccgttgcgctggtctacaacggcattagccatgtggtgatgatggcgagccccaaagaccttgagtactttgcgctcggttttagcctttccgaggggattatcgaaagtccgcgcgatatcttcggcatggatgtcgttccttcctgtaatggtcttgaagtacaaattgagctttccagccgccgctttatggggttgaaggagcgccgccgggcgctggcgggacgtacgggctgtggcgtatgcggcgtggagcaacttaatgacatcggaaaaccggtgcagccgctaccgttcacccagacgtttgatctcaacaaactggatgatgcattacgtcatctcaacgattttcagccagtggggcaactgactggttgtactcacgccgctgcctggatgttgccatctggcgaactggtcggcgggcatgaagacgtgggtcgccatgtggcgctggacaaactgttaggccgccggagtcaagaaggggaaagctggcagcaaggtgcggtactggtttccagtcgtgccagttatgaaatggtgcaaaagagcgcgatgtgcggcgtagagattttgtttgcggtgtctgccgcgaccacgcttgctgtagaagtggctgagcgctgtaatctgacactggtaggtttttgtaaaccgggtcgggcaacggtttatacccatccgcagcgtttgagcaattaattaaaataagtcctgcgaaatatattaaattgcaggacttattcatttcgtgaattttattattttatttataaacaaaatgcgtgtagtggcgttttcttttttcatttattatgttcactctcttatctatatatttataaggcaattaaatgaaaaggaatttattatcttccgctattatagtcgccatcatgtccctcggtctgacgggttgtgatgataaaaaagccgaaacagaaacgctcccgcctgccaatagtcaacctgccgcaccagctcctgaagcgaaacctactgaagctcccgttgcaaaagcagaagctaaacctgaaacacctgcgcaaccggtggtcgatgaacaagcggttttcgacgaaaaaatggatgtctatatcaagtgctacaacaagttacagatcccggtacagcgcagtctggcgcgttatgctgactggctgaaagattttaaacaggggcctaccggtgaagagcgtactgtttatggcatctacggcattagtgaatccaacctcgctgagtgtgaaaaaggcgtaaaaagtgctgtggcgttaacgcctgcgctgcaaccaattgatggcgtggcggtgagttatatcgatgctgccgtggcgttgggtaataccattaacgaaatggataaatattacacccaggaaaattataaagacgatgcgtttgcgaaagggaaaacgctgcaccagacattcttaaaaaatctggaagcctttgaacctgtagccgaatcttatcatgcggcgattcaggaaattaatgataagcgtcagcttgcggaactgaaaaatattgaagaaagagaagggaaaacattccactactactctctggcagtcatgattagtgcgaaacaaattaataacctgataagccaagataagtttgatgcagaagcggcaatgaagaaagtgtctgaactggaaacgctagtggcgcaggccaaagaagcggataaaggcggcatgaatttcagctttattaatagcgcaggccagtatcaactcgaggctaaaaaatacgttcgccgcatcagagataaagtcccgtactctgactgggataaagagcaacttcaggacgcaaacagtagctggatggtcgaagactctttcccgagagcattacgcgagtacaacgaaatggttgatgactataatagcctgcgttaaacgtttttgatgataaatgcagtgtcggatgcggcgcatccgacacagttcaccccttgtgaagtaactccataaatgcctcatatcctgttaacccggcaataatctccgccggatgctgacacaatatgcttgccagatagctaaatatttttagctcatgacgcgcatcggcggcggcgcaggcgatcaagacatggttaatgacttcgttattcacctcaactggttgggcgagggtaataaaaaatccacgaaaacgtcgctcctgttcgctccagcaatgtgggatggcgaggcgattaacaatcaggttttcaccttcgccttcgcgggcgatgatgcgttgtgcttcatcggcggtaatatggtgttgtgcgactaattgcgcacaaatttgccgggtaatatgttgccagctttcaccgcgtacattgctataatgaaaacttccgggggcagagaaaaaacgctccggctgttggcgaataaatgccgtcgccagaaaatgttttatttgttcgataccggcagccgtaatgatattttttacggtgatgtaattatttaccgcgtcatccagtaaataatggctgttgttaatgatcaataacggctcaatctcttcgcgaatggcaacaagttcgcttaagctacgggcaataattacccgacaatttaaaacatcgcgctcaatggcgagctgattaatagtggcaatcgcgttctggtcgctgagcaaaatgatcggctggcgttcgttttgatgccgctccagcgcacaggcaaaatacaaaccgatcagatcgctgtcgaaaaggggaatatcgagctgttcacgcagtagcgtaataaagtgcagactcatatcaaaggccgcaggccaggcggctttcaggttattcatgctgctctggcggtgctcagcaatccacactggtgcggcaaggcaacgtaataaatgcccggtaatattctcaaccagctgcgcatcaataatattcaaactcgcgatgcccggcaccctttgcagcaacccctgcacattatcggcactaattacctgcgcttgctgatgctgtttctctatcaaacccgtcagggttcttacagcgttatcaccaagaaacagaccgctatgttcaacgatttgttttatctcgtcaccgggatattgcggccactcatcggtcagttgattacgcagggcgtaaatcgccagaatcaggctggagagataatcaccctgcatgagcggccagcggtgttggttgtcgcaggccgtggataaatgctgaaggttgtctcgtgttatgcccgccagcggaattaaaaacggatctttgcgcagcaagttcgccagcaagataacgcgtttctcttctgtctcatcaatgaaatggcccaaaccagggcggctggccaggcaacaagtgcgttcataacgctgttttaaccggggcagacgctctgctacccacgtttctggcaaattaagcgcgctggcgagttgcgcacggggagtgaaagtattcagtaataacagcgccagcagccgatcgtcgttatcgtgcttttgcagcaactgaaaaaagctgcggcgctcgaagatttccagctgatagcccgcactgccactggcgaaaatgcgggctttgccgttaagggtgaagttgagatagtcaatatcacgcaggatggtcctgccactaacgccagtctgttgcgccagctcgccaggcgtgcgcggctgttgctccagcagatcgacaatctttaactggcgttcgtttagcattaatccacctgacggaactggctaaacgcgttgactttctccgcagttaaggtcgtcagaaaaccccgtatcagcgtgagcagagcttcgtaatcggctttactaatcataccgctgttggcgtgcagataacgagttggcagacacagcgcgacaaccggacgcccgccgcccatcacgttgtagcgcccgccatccgtcgcaccggttttcatggtggaaaattgcagcggtaaatcgttatgtgcggcacagctttttaacgctgctaccagtttctggttggggaagtagcgcttgtcaaacagcatcagccccggcccctggcccagtttcagcgggtatttaatgttatcaatgcccggaacatcgcccgctacggcggtatccaacacgatcacgacgtccggtttaatgtgttccgcgctggtttgcgccccgcgtagcccaacttcttcttccacactgccaacgccatacagcgtaatttcgggattattcaccgtctgcaatagttcagccatcattgcgcagccgatgcggttatccaacgccttgccgaccactttatcttcgccccagcaggcaaaattggcttccgggctaataaaattaccaatttccacgccgcgcttttccacctcttcgcgactgttcgcgccaatatcaatgaacatctcatcaaaactcagcggttgttgcttttgcttttccgttaacgcatgaggcgcgacggaaccaatcacaccagggattttcactcccttgtgtgtgcgtatggttacccggtggttgagcatgctctgattccaccagccgccaatggtggtaaaacgcagaaaaccgctctcgtcgatgtgggtgaccataaagccgacttcatccatatgtccgacaacggcaacttttggacctttattccccttacgggcaacaaagctgcccagaccatcgaaggtgatttcattcacgcaaggttccagcgtgtttatcagaatgtcgcgaacttcctgttcatcgccgctgacggcgctggcttcgcacaactgttgcagtaactcaatgttcatggacaagctcctgttgcgcggctttcgctttgcggcgtaaccacaatcctttcaggacgataatgaaactaatgttcagcgcgaggccaatcgccagcaccagataaaagctacccaccgggctcatcaggccgatcagcgggtcaaagatacccaaaccaggtgccagacgtttgattccgaaagcgatcaccagcacgccggtaatgccgcccgccagcgtattggcggtaatcatcggcaacggagctgccagagcgtaaggaatagccggttcggttgcgactgtggcaccgaccacaatggcactactggcagcctctttttcctgtcgggtaaacagtttgggcgcaatgaacgtcgcaagacccgccgcgacgggcggcatcagcgcgacaacgccgacgatggcgtaccagtcataaatgtgtttttccagcagactgaagcagaagaaccaggcggttttattgatggggccgcccatatcgaacgccagcatcgcaccgaccagaaacgctgccgcaaacttcatacttggaggaatggtattcaggaagtggagcagcccgcccatgaggtcggacatcaccggcccgataacgtagtaagtgagcacgccgaaaaccagcagagtaacgaacgggatcagcatactaccgagcagcggttgtaatgctttgccaaggcgcactttgcggaaccagaagacgaaatagccaatcgccagccccagcaccaccgcgccgaggaatcccgcaccgctctgggtgccgagcagcgctttgtcgttcgccagatagcaaaccagaaacgccggagcgaaagccggtttatcggcaatgctgctggcaatataagcgcccatgatggggatcataaaggtgaagccaaggtaaccgatggattcaactacccaggtaaagctcggcgcgcctttgctcatatcggtatacggcaaaccgaactgcaccagcatgttggcaagcgccaccaggataccaccgccgatgacaaacggcagcgccgcagagacgcccgccatcaggtggctcatcacgctaccgctttgcacttcctgtttgccaagcttcacgccgctatctgcggcaaaaagctggctgtttgtcggtaattcgctgaaaatctggtcgatatttttcaacgcctgggagatggcaatctcataaactttcttcccggcaaaccgcgcgcgatcatcaccgctcaggccacgcccggtagcgagaatgacgtaatcggcagcggcaatctcttcgctggataagcggttttcaacgccactggacccttgagtttccacttttatggtatgaccgagagaacgggctttctgttccagggcttccgccaccatgtaggtgtgagcgatcccggcggggcagttggtgatcgcgacaatacgtaaggaactctccatcgccacttccttaactgctgagggtttgatttaacaaggcaagcgcctggtcggtatcgccctgttgcagttgatgaataaattccttgtgaataattttgcgacacagtgtgccgatgattttgacctgatcctcttcgccgctttgcggcacgccgaggcagatccagcaattgacgtcttcgccatcgctggctttccagtcaatagcctgcgctttgcgggcgaataatacgaacggttgtttaacgcaggcgcttttaccgtgcggcacggcgacaccggaaccaaatccagtagagtgcattttttcgcgcagcagcagggtttgcaggaactggtgactgtcggtgataaaaccgttttgtaacgctattgtcgccaactgcttcagaacggaataagcgccattgccctgaatattcaggtcaatacagcttgcagtaagagctgccattaatcggactccataaaatatattttaatcaattgtaatggtggagcgattaagtgatgagaggcgatatgtcggtaaacaatgacaatttgagacagagtgaaaggtcagatttgcggagtaatgcacataatggttatttaaataaaccacatgaatcattaatgggttattcattatttttgtgatttactcacaatgtatcagggaaatataacttaccgggagatgtaatatgtttaatttttcaaatcgaaatttaaaatattgtgccggaggcatctctggcacattgggcaattacggcaggtaaaacacttcttgcagctcgctactcaccgggctgttatccgggttagcgggcataacatcggtcatatatttccaccaacgttggcagacatcagtgctggcaaccgcattccagcgttcttcagattcaatctctaccatggcaaacagcagattacgcgctttgtcgagatagatggcgtagttatgcgcaccgtgagatttcagcactgcttccagttctggccagatgggattatgccgacgctgatactcttcgtgggcgtcggggtttacctgcatgacaaaggctttgcggatcatgtttgctccttacagcgccagcgcactggcgagtggcgtaacgccgaaacgcttgccgagcgctatcaactcttcacggctgatggtctgtttcatgccgcccatgctataaaccttcactaatacttgtgcacttttttctgcggtgtcgattaaaccgaaggtttcatccagcgtcggtccgctgccgaagacgccgtggaagggccacaacaccaggctatgtttttgcatctcttgtgcggtcgcctggccgatttcgtccgtgccgggcaccatccacggcaaaatgccaacgccatccgggaataccaccagacactcggtgctgccttcccccagttggcgagtgaagaccgcggtgtcgttttcaagtacataggtgagggcgatcaggttggtggcgtggcagtgcatgatcacccgatctttgccgttggtggctttaatgcgctcgcagtgggaaaggaagtgagccggaagttcggaagtggggacggcttcgttggttaacccccaaagaatgtggtagcccgcgccgtcgctgtcgacttttacgatgcctaagttagccgcaggatcaagctggacgttacggaagaatttgccgctgccggtgacaataaacggtgtatttgccagtaaaggcatgggctggctgagcgggatatagcgcggttgttggtggaaattgtcgtgatatggtgcgatatcggcgtcatccaggcgtagcgtcaggttgccgccgttgcgctcatcccagcctttcagccaggcgtcggtggtggctttgatcattccctggacaaaccaggactgagtaatgttttgcatgttctgtgttcctgtaaattcggtgttgtcggatgcacgacccgtaggccggataaggcgctcgcgccgcatccggcaatcaatgcctgatgcgacgctgtcgcgtcttatcaggcctacaactattgccgacctgtaggcctgataaggcacttgtgccgcatccggcaatcaatgcctgatgcgacgctgtcgcgtcttatcaggcctacaactgttgccgacctgtaggccggataaggcacttgtgccgcatccggcaatcaatgcctgatgcgacgctgtcgcgtcttatcaggcctacaactattgccgacctgtaggccggataaggcacttgtgccgcatccggcaatcaatgcctgatgcgacgctgtcgcgtcttatcaggcctacaactgttgccgacccgtaggccggataaggcgctcgcgccgcatccggcagtgtttacccgcggcgactcaaaatttctttctcataagcccgcacgctctccagccattcgctacctgctggcgtatcgtgacgttggcaatacatttcccagaccgcctgccacggcaagcttttctgctcttccagcagtgccagacgcgcagtgtaatcgcccgccgcttccagcttgcgcagctcagcggtaggttccagcaacgcacgcagcagggcttttttcatattgcgtgtaccaatgacccacgcggcaatgcggttgatagaggcatcgaagaagtcaaggccgatatgcacccggtcaaacagatcgtgacgcacaatctcactggcaattgcctgggtttcatcatccagcagcactacgtgatcgctgtcccagcgaaccggacggctgacgtgcagcagcaactgcggcacatacagcatggcggcggaaatcttgtcggaaatcacttcagtcgggtggaagtgcccggcgtccaggcacagcgcagtctggcggctggtggcataccccatgtaaaactcattggagccaaccgtgtagctctctgcgccaatgccaaacaatttgctctcaacggcgtcgatatggtgcgcagggtttagcttctcgctgatcacctcatccagtgctgccagcagacgctgacgcggggcgagacggtcaacggtgatatctttcataccatccgggatccagatgttcatcacgcttggtgtgccgagttgctcgccaaaataggcgctaacgcgacggctggctttgcagtgatcaatccagaactggcgaatgctgtcgtcggcatgggaaagcgtaaagccatcggcgcttagcggatggctaaagcaggaggggttaaaatccagaccgagctgattggctttcgcccattcaacccagtttttgaagtgctctggtttgatctggtcgcggctgactggcgtatcactttccagatagatggcatgtaaattaagccgtttcggccccggaatcagccgcatagcctgttccagatcggcacgtagctcactggcattacgcgctttgcccggataattgcctgtggcctgaatccccccggtcaggctaccttccgggttttcaaaaccggaaacatcatcgccctgccagcagtgcatactaacgggtaaacgatcaagttggcgcagcgcctcctcgacatcaatccccaccgccgcgaaacgctgtttcgctagctcccaggcctgttccagttgagtggtcatgcgcaaagctcctttgtctgtcgtgtagagtgaatctgcgccacatagtgggcaatttcactgtcaggattaggggtaaaggtggtcagattcgcggtggtgctgacgacctgacggaaatcatccacattgttgagttcatccagcgtcattaactggatgccgatattgccgagcgtgctggcttcaacaggcccggcgatcacccgaataccgcaggcatcggcgcatagctggttgagcagcgtgttctggcagcctccgccgacaatatgcagttggctgaaatcttcaccgcgcagctgcgccagctcatgcaacacatcggcatacagcagcgccagactgtcgaaaatgcagcgcgccagttcagcatcactttccgggatcggttgcgccgtttcccgacacgcagcctgaatttcgctgcacatcgtctcaggattaataaagcgatcgtcattgggattgataatgaagcggcaagccggaagtgcctgtgtcgcggagataagcgccggaagatcgttgatttgctgctcctgaagcactcgctgaagcagccataagcccataatatttttcagcacccgatagcgaccttccgccccgccttcattggtgatgttggctgccagtgccgtgtcattggtaaatggcgtctggctttcgaagcccatcaaactccaggtgccagaagagagataagcagcacgactgccgtttaacgggctggcgataaccgcgctggcggtatcatggctggcaacggcgaccactggaatctcattaccctgcgggcaaatccagtgacctatgacattacccggatgcgtcgggcgaccaaaccaggctttgttggccccgctccacgccagtaggctctcgtcccagtcgtcgctattgatattgaccagttgcgtggtcgtggcgttggtatattcccagttcatcttgccggtcaggcgataactgaagtaatccggcatcagcagagcgtgagcaatgtgtggaataagttcaggttgttgctccgtcagcgcacgcaactgataaagcgtattgaagggcagaaactggatgccgctacgttgataaatatcgcgtttgccgagttgttgttgtgcctgcgccattaggccattggtgcggctatcgcgataagcaacgggcaggcccacacgctgaccctgttggtcgagcagcacaaagtccacgccccaggtatcaatcccaatgctatcgatacgaatcccttcctcgcacaccttgtttaatccaaggcgaatggcactttcaaggctatccacatcccaggtgacatagccgttctgactatgcagcccattgttaaaacgatggatttcgcgcagcgtcaggctgcggcattcacgctcgtaacgcgccagcatcacgcgcccactggatgcgccgagatcgacggcgacacaattgcgaaaggtcataatgtgatcctgctgaatttcattacgaccagtctaaaaagcgcctgaattcgcgaccttctcgttactgacaggaaaatgggccattggcaaccagggaaagatgaacgtgatgatgttcacaatttgctgaattgtggtgatgtgatgctcaccgcatttcctgaaaattcacgctgtatcttgaaaaatcgacgttttttacgtggttttccgtcgaaaatttaaggtaagaacctgacctcgtgattactatttcgccgtgttgacgacatcaggaggccagtatgaccgtattacatagtgtggatttttttccgtctggtaacgcgtccgtggcgatagaaccccggctcccgcaggcggattttcctgaacatcatcatgattttcatgaaattgtgattgtcgaacatggcacgggtattcatgtgtttaatgggcagccctataccatcaccggtggcacggtctgtttcgtacgcgatcatgatcggcatctgtatgaacataccgataatctgtgtctgaccaatgtgctgtatcgcagcccggatcgatttcagtttctcgccgggctgaatcagttgctgccacaagagctggatgggcagtatccgtctcactggcgcgttaaccacagcgtattgcagcaggtgcgacagctggttgcacagatggaacagcaggaaggggaaaatgatttacccagcaccgccagtcgcgagatcttgtttatgcaattactgctcttgctgcgtaaaagcagtttgcaggagaacctggaaaacagcgcaagtcgtctcaacttgcttctggcctggctggaggaccattttgccgatgaggtgaattgggatgccgtggcggatcaattttctcttagtctgcgtacgctacatcggcagcttaagcagcaaacgggactgacgcctcagcgatacctgaaccgcctgcgactgatgaaagcccgacatctgctacgccacagcgaggccagcgttactgacatcgcctatcgctgtggattcagcgacagtaaccactttagcacgctttttcgccgagagtttaactggagtccgcgtgatattcgccagggacgggatggctttctgcaataacgcgaatcttctcaacgtatttgtacgccatattgcgaataatcaacttcgttctctggccgaggtagccacggtggcgcatcagttaaaacttctcaaagatgatttttttgccagcgaccagcaggcagtcgctgtggctgaccgttatccgcaagatgtctttgctgaacatacacatgatttttgtgagctggtgattgtctggcgcggtaatggcctgcatgtactcaacgatcgcccttatcgcattacccgtggcgatctcttttacattcatgctgacgataaacactcctacgcttccgttaacgatctggttttgcagaatattatttattgcccggagcgtctgaagctgaatcttgactggcagggggcgattccgggatttaacgccagcgcagggcaaccacactggcgcttaggtagcatggggatggcgcaggcgcggcaggttatcggtcagcttgagcatgaaagtagtcagcatgtgccgtttgctaacgaaatggctgagttgctgttcgggcagttggtgatgttgctgaatcgccatcgttacaccagtgatagcttgccgccaacatccagcgaaacgttgctggataagctgattacccggctggcggctagcctgaaaagtccctttgcgctggataaattttgtgatgaggcaagctgcagtgagcgcgttttgcgtcagcaatttcgccagcagactggaatgaccatcaatcaatatctgcgacaggtcagagtgtgtcatgcgcaatatcttctccagcatagccgcctgttaatcagtgatattagcaccgaatgtggctttgaagatagtaactattttagcgtggtgtttacccgggaaaccgggatgacgcccagccagtggcgtcatctcaatagccagaaagattaattcgccatgccgatgccgacgatgttagcggcgacaataatcaccacacaaccgaggctcaacaccgttaccggacggcgtcctgcattgttccactctttcagcaccagcccgacgataccgccgcacaatacatagaaactcatatgcagcatccaactgatgtagtcatactgcgccggaatgcgggcgtggccccaggcatagaaaaagaattgcagataccacatcaacccgcccagtgtgctgagtaacacattgtgaatgatcaggctttttgccaggctgaagtcggcttttaggctcaaatccttcacttttgccagacgaataaaacagaaaccgaggttaatgatcgcgccgccgcccatgatgacaacatagcttggcagagcgacatacagtggatcgacgccaagtgcggcagcggcttcatgcatcggttttgcggcgttcatcgcaaaggacatcccggcagagaaaatgccgcacatcaccgccagcaccagcccttttttcagattgaactcttcggctttaatgcccatcttgcgctctttcaactgcccggcgcgagttacaatccctacgccaatcagcgccaccagaacgccgagcaacgtcatgcgtccgccttcggtgctaatcaacacatcgaaattgccgttgataattggcgtcatcagcgtaccgacaatcaacgtaatgccaatggcgatgccaattcccatgctcatgccgagataacgcatggtcaggccgtagttgatattaccgatcccccacatagcgccgaacagaaaaacaggcagtcgcgtagagagactaaagctgctgtaatacgcccagaaattcggtagtaacagggcgctgatggcccacggcagaataatccagctaacaatcccaccgacactccacatggtttcccaactccatttttttacttttttgaacggagcgtaaaaacaggctgcactggccgcgccgatcaaatgccaaaatatccccatcgtaatcgcgttactcatcttcttatcctcatcatttttcgtcgcgtcacatctccgacgagatgagtgtaaaaatcgtgctgtcgattaacctttcgcctgttgccgccgttgtcgatttactggcaatcacggcattaagtgggtgatttgcttcacatctcgggcattttcctgcaaaaccatacccttacgaaaagtacggcattgataatcattttcaatatcatttaattaactataatgaaccaactgcttacgcggcattaacaatcggccgcccgacaatactggagatgaatatgagctataccctgccatccctgccgtatgcttacgatgccctggaaccgcacttcgataagcagaccatggaaatccaccacaccaaacaccatcagacctacgtaaacaacgccaacgcggcgctggaaagcctgccagaatttgccaacctgccggttgaagagctgatcaccaaactggaccagctgccagcagacaagaaaaccgtactgcgcaacaacgctggcggtcacgctaaccacagcctgttctggaaaggtctgaaaaaaggcaccaccctgcagggtgacctgaaagcggctatcgaacgtgacttcggctccgttgataacttcaaagcagaatttgaaaaagcggcagcttcccgctttggttccggctgggcatggctggtgctgaaaggcgataaactggcggtggtttctactgctaaccaggattctccgctgatgggtgaagctatttctggcgcttccggcttcccgattatgggcctggatgtgtgggaacatgcttactacctgaaattccagaaccgccgtccggactacattaaagagttctggaacgtggtgaactgggacgaagcagcggcacgttttgcggcgaaaaaataatcatttgccgcctgctgcaatgaggcgtataggccgcatatcagcttaaaaaatgaaccatcgccaacggcggtggtttttttgtgatcaatttcaaaataaaaacaatgatccgataaaaataaaacagcgtttcaattgatgtggttttgatcacttttattgattaaatgaatgtctatcttcgtttccatcaacactgatgctccattgaggaattacgcatcagcccttaaaaatatgccgacaggtgatggaaatgcagataaagcgcagcattgagaaaatcccggggggggatgatgctcgtcccgctattccttggcgcactgtgccacaccttcagcccgggggcggggaaatattttggaagtttcaccaacgggatgattaccggtacggtgcccattctggcggtgtggtttttttgcatgggggcgagtataaaattaagcgcgacgggaacggtactgcgtaaatccggtacgctggtggtaactaaaattgccgtcgcgtgggtggttgcggcaattgccagccgtattattccggaacatggtgttgaagttggattctttgccggacttagtacgctggcgctggtggcggcgatggatatgaccaatggcggactttacgcttccatcatgcagcagtacggcacaaaagaagaagctggggcatttgtgttgatgagcttggagtccgggccgctcatgacgatgattattctgggcactgccgggattgccagctttgaaccgcatgttttcgtcggcgcagtattaccgttcctggtgggctttgccctggggaaccttgaccctgaattgcgagaatttttcagcaaagcggtgcaaacgctgattccattctttgccttcgcgctgggcaataccattgatttgactgtgattgcccagactggtttgctggggatcctgttgggtgtggcagtaattatcgtgaccggtattccgttgattatcgccgataaattgattggcggtggcgatggcactgccggaattgccgcttccagttccgcaggggccgcggtagcgacacctgtgctgattgcagaaatggtgcctgcgtttaaaccgatggctccggcagcaactagcctggtagcgacggcggtcattgtgactagcattctggtgccaattcttacctctatctggagtcgtaaagtcaaagccagagcagcgaaaatcgaaattttaggtacggtgaaataaacctgcttccttaatccccacagccggatgaactaacgttcgtccggtttgctattgagttcctgcctggatacttaccgcgaaaacagcacgcctgacataaaataaatatggtctaatggggaaatttctcgtggagagggaacagatgcgatatccggttgatgtatacacaggcaagattcaggcttatcccgaaggcaaacccagcgcaattgctaaaatccaggttgatggtgagttgatgctgacggagctggggctggaaggtgacgagcaggcggagaaaaaggttcacggcgggccagacagagcgctgtgtcattatcctcgtgagcattatctctactgggcgcgggaatttccggaacaggcggagttgtttgttgcgcctgcgtttggtgaaaacctcagtaccgacggcctgacggaaagtaatgtttatatgggcgatattttccgctggggagaggcattaattcaggtcagccagccgcgcagcccttgctataaactcaattaccattttgatatcagcgatatagcgcagttgatgcaaaacacaggtaaggtggggtggttgtatagcgtgatagcgccagggaaagtgtctgcggacgcgccgctggagttggtttcccgtgtcagcgatgtgaccgtgcaggaggctgccgccatcgcatggcatatgccgtttgatgacgatcaatatcaccgtttactctccgctgccgggttaagcaaaagctggacgcggacgatgcaaaagcgccgactgagcggcaagatcgaagatttttcccgccggttgtggggaaaataacccccggagtgtaggcctgataagacgctatcagcgtcgcatcaggcatcctgctcaaatgccggatgcggcgtaaacgccttatcctgcctgcaaatgcgaagtttaactccgcttatacagcggcaaccaaatcaccagccgtaaaccgcccagcgggctgtcttctgccttcacccagccacgatgctgctgaatggcggtttcaacaatcgccagccccaaacctgtaccgccagattcacgatcgcgtgcttcatcggtacgatagaacggacggaaaatctgttcgcgatcttccgggctaacgccaggaccatcgtcgtccaccgtaatggtgataccgtctttatctaccgcaaagcccacttcaatcttcgtatgggaataacgcagagcattacgaacaatgttttccagcgcactttccagggcgttcggattgccgtacagcggccacggcccaggcgggaagttaactgtcaagctcttgcccatttgctcggcttcgaacgccgcgttatccagcacttcactccacaactggttggctttgatggtttcgctaaccagcgcgtttttttgctgattacgactcatcaccaacagatcgttgatcatgctgtccagacgttgcgcttcggtttcaatacgctccagttccttgctttcaccgctacgacggcgcagtaacgccgtacccagttgcagacgcgtcagcggggtgcgcagctcgtgagagatatcagaaagcagacgctgctgagaggtcatcatgcgctccagcgcggtgaccatctggttaaaactggcacctgcggcaaggaattcctgtggccccgcttccagttccgggtgctggcgtaagtttccctgggcaacttcatcggcagcgtttttcagcttacgcgccggttttgccagactccaggccaaccacaacagcagcggcgtactgaccaacatggtgacaatcagcagtaatagcgggcggtcaaacagtaagttaatgaaatcggattgagaactgctggccggacgaatcagataaagttggtaattatcttcgccatcacgcacggagaacggaccgaccagttccacgcggccatactttttcttctgcggatgatcggcgttatcggcctgaccaataaagttacgaatgatctgcatttcgctgcgttcagcgccgatcacgcggccttcggtggtcaccaataacaaacgctgtcctggcggtgcccacttatcaatcgcccggaacagacgccgccaccacattaaatcgttgggcggatcgttcgccagctccgcttcgacatgctgctcaatcatcagcccctgacgctgttcgctatccagaagctcggtcatctggcgactatcgagcttgggtaacatcaaaaccaacatcaacaccagcgccagcgtcagccagaagatggcgaagatgcgcgcggttaagctgcctatcatgaagcagaaaccatcagatattagctcaactagcagaaaccatcagatagccgcgaccacgcaaggttttaaaccacgggtgaccatctttacgatccggcagtttacgacgcaggttggaaatgtgcatatcaatagcgcggtcgaaaggcgtcaggcgtttgcccaacacttcctggcttaaatgttcacgggaaaccacctgacccagatgctgtgccagcaaatagagcagggtaaactcagtaccggttaactccagcgtttgcccgtcgaagctggcttcctgacggcctggattcagcactaaggcatcaacttccagtgtcggactaccgttgtcgttgttttgctgttgctcgctccagtggctacggcgcaggatcgcgcgaatacgtgccaccagctcacgatcattaaacggtttcgggagatagtcatctgcgcccagctcaaggccgagaacgcgatcaagttcactgccgcgcgccgtcaacataatgacaggcgtctggtgtgtctggcgaagtgcttttaatgtgtcgataccatttttcttcggcatcattacgtcaagcaaaagtaaatcaatgctgtcgtccagaagatcaagcgcctgttccccatcgtgggcaacaatcacgttgaagccttccatctcgagcagctcctttaatagggaagtcagctctcggtcatcatcaactaacaggattttattcattgtttaaatacctccgaggcagaaattacgtcatcagacgtcgctaatccatgactttacgttgttttacaccccctgacgcatgtttgcagcctgaatcgtaaactctctatcgttgaatcgcgacagaaagattttgggagcaaatgatgcgcatagttaccgctgccgtcatggccagtacgctggcagtcagtagtttaagccacgctgctgaagtcggtagtggcgataactggcatccgggtgaagaacttacgcagcgcagtacgcagagccatatgttcgacggcataagtttaaccgaacatcagcgtcagcagatgcgagatcttatgcaacaggcccggcacgaacagcctcctgttaatgttagcgaactggagacaatgcatcgccttgtcaccgcagaaaattttgatgaaaacgctgtgcgcgcacaggcagaaaaaatggcgaatgagcaaattgctcgtcaggttgagatggcaaaagtccgcaaccaaatgtatcgcctgttaacgccggagcagcaagcggttttaaacgagaaacatcaacaacgaatggagcagttgcgtgacgtgacgcaatggcaaaaaagtagtagcttgaagctattgagtagtagcaacagtcgttcccagtaataaaccctgttttccttgccatagacaccatccctgtcttcccccacatgctgtgggggtttttttatcctcaatttgcctgctgcttaatgcattgcagatgatttgcttccgttatactagcgtcagttgatagcgggagtatttatgaatcaatcttatggacggctggtcagtcgggcggcgattgctgcgacggcgatggctagcctgctattgctgattaaaatttttgcatggtggtataccgggagcgtgagtattctcgccgcgctggtggatagcctggtggatatcggcgcgagcttgacgaatttattggtggtgcgatattccctgcaacctgccgacgataatcacagctttggtcacggtaaagctgagtccctcgcggcgctggcgcaaagtatgtttatctccggtagcgcactattcctgtttttgacgggtattcaacatctgatatctccaacaccgatgacagatccaggcgtcggggttatcgtgacaattgtggcgctaatttgtacgattatccttgtcagctttcagcgttgggtggtgcggcggacgcaaagccaggcggtgcgggctgatatgctacattaccagtctgatgttatgatgaacggcgcaattctgctggcgctggggttgtcctggtacggctggcatcgcgccgatgctctgtttgcattgggaatcggcatctatattttatatagcgcgttacgcatgggatatgaggcggtacagagtttactggatcgcgcattgcctgatgaggaacggcaagaaattattgatatcgtgacttcctggccgggtgttagcggcgctcacgatcttcgcacgcggcagagtgggccgacccgctttattcagattcatttggaaatggaagactctctgcctttggttcaggcacatatggtggcggatcaggtagagcaggctattttacggcgttttccgggaagcgatgtaattatccatcaggacccctgttccgtcgtacccagggagggtaaacggtctatgcttagttaatcagtataaaagagagccagacccgcattttgtgtataaaataccgccatttggcctgacctgaatcaattcagcaggaagtgattgttatactatttgcacattcgttggatcacttcgatgtgcaagaagacttccggcaacagatttcattttgcattccaaagttcagaggtagtcatgattaagaaaatcggtgtgttgacaagcggcggtgatgcgccaggcatgaacgccgcaattcgcggggttgttcgttctgcgctgacagaaggtctggaagtaatgggtatttatgacggctatctgggtctgtatgaagaccgtatggtacagctagaccgttacagcgtgtctgacatgatcaaccgtggcggtacgttcctcggttctgcgcgtttcccggaattccgcgacgagaacatccgcgccgtggctatcgaaaacctgaaaaaacgtggtatcgacgcgctggtggttatcggcggtgacggttcctacatgggtgcaatgcgtctgaccgaaatgggcttcccgtgcatcggtctgccgggcactatcgacaacgacatcaaaggcactgactacactatcggtttcttcactgcgctgagcaccgttgtagaagcgatcgaccgtctgcgtgacacctcttcttctcaccagcgtatttccgtggtggaagtgatgggccgttattgtggagatctgacgttggctgcggccattgccggtggctgtgaattcgttgtggttccggaagttgaattcagccgtgaagacctggtaaacgaaatcaaagcgggtatcgcgaaaggtaaaaaacacgcgatcgtggcgattaccgaacatatgtgtgatgttgacgaactggcgcatttcatcgagaaagaaaccggtcgtgaaacccgcgcaactgtgctgggccacatccagcgcggtggttctccggtgccttacgaccgtattctggcttcccgtatgggcgcttacgctatcgatctgctgctggcaggttacggcggtcgttgtgtaggtatccagaacgaacagctggttcaccacgacatcatcgacgctatcgaaaacatgaagcgtccgttcaaaggtgactggctggactgcgcgaaaaaactgtattaatgatttcggaaaaaggcagattcctttaccctgaaaccgatgacagaagcaaaaatgcctgatgcgcttcgcttatcaggcctacatgaattctgcaatttattgaatttgcaaacttttgtaggccggataaggcgttcgcgccgcatccggcatggacaaagcgcactttgtcagcaatatgaggcggatttcttccgcctttttaatccctcaacatatacccgcaagttatagccaatctttttttattctttaatgtttggttaaccttctggcacgctttgctcatcacaacacaacataagagagtcgggcgatgaacaagtggggcgtagggttaacatttttgctggcggcaaccagcgttatggcaaaggatattcagcttcttaacgttagttatgatccaacgcgcgaattgtacgaacagtacaacaaggcattcagcgcccactggaaacagcaaactggtgataacgtggtgattcgtcagagtcacggtggcagtggtaaacaagcgacgagcgtaatcaacggtattgaagctgatgttgtcacgctggctctggcctatgacgtggacgcaattgcggaacgcgggcggattgataaagagtggatcaaacgtctgccggataactccgcaccgtacacttccaccattgttttcctggtacgtaagggaaatccgaagcagatccatgactggaacgatctgattaaaccgggtgttagcgtgatcacgcctaatccgaaaagctctggtggcgcgcgctggaactacctggcagcctggggctacgcgctgcatcacaacaacaacgatcaggcaaaagcacaggattttgttcgggcactgtataaaaacgtcgaagttctggattctggcgcgcgtggctccactaacacttttgtcgagcgcggaattggcgatgtactgattgcctgggaaaacgaagctctgctggcagcgaatgaactggggaaagataaattcgaaatcgtcacgccgagtgagtctatcctcgcagagccaaccgtgagcgtggtcgataaagtggtcgagaaaaaaggtactaaagaggtggcggaagcctacctgaaatatctctacagcccagaaggtcaggaaattgccgcgaaaaactactaccgtccgcgcgacgctgaggtggcgaaaaagtacgaaaatgcgtttccaaagctgaagttattcaccattgatgaagagttcggcggctggacgaaagcgcaaaaagagcattttgctaacggcggtacgttcgatcagatcagcaaacgctgatttccccaggataattatcaaacccggtggtttctcgcgaccgggttttttatttgtcacgattttgcgttacccttgcatctctttgaggtacagggaaaaaaagatgaaaaaagcgggtcttctttttttggtgatgatagttatcgccgttgtggctgccggtattggttactggaaattaaccggtgaagagagcgatacattacgtaagattgtccttgaggaatgtttgcccaatcagcagcaaaatcaaaatcctagcccatgtgcggaagtcaaacccaatgccggatacgtggttttaaaagatcttaatggcccactgcaatatctgttgatgccaacgtatcgtattaacggtactgaaagtcctttgttgaccgatcctagtacgccgaacttcttttggttggcttggcaggcgcgtgattttatgagcaaaaaatacggccagccggttcccgatcgcgcggtttctttggcgatcaactcccgcaccgggcgtacgcaaaaccattttcatattcatatctcttgtattcgtcctgatgtgcgcaaacagctggataacaatctggcgaacatcagcagccgctggttgccactgccaggtggtttgcgcgggcatgaatacctggcgcgtcgggtaacggaaagcgaactggtacaacgcagcccatttatgatgctggcagaagaagtacctgaggcgcgggaacatatgggacgctacgggctggcgatggtacggcagagtgataacagttttgtattgctggcgacacaacgaaatctactgacgcttaaccgtgctagtgccgaggaaattcaggatcatcagtgtgagattttgcgttaaggcgaagagttaaggaaagtaagtgccggatatgaaatccggcacctgtcagacttaagcctgtttagccgcttctgcagctttaacgattactgcgaaggcgtcagctttcagagaagcaccaccaaccagcgcgccgtcgatatccggctgagcaaacagttctgcagcgttagacgcgtttacagagccgccgtactgaatgatcacttgttcagcgatgttagcgtcaactttagcgatgtggtcacggatgaatttgtgaacagcctgtgcctgagccggagttgcagatttgccagtaccgattgcccatacaggttcgtaagcgataaccgcaccttcgaatgccgcagcaccctgagttttcagtaccgcgtcgatctgacgtgcgcaaacttcttcagttttgcccgcttcattttcagcttcggtttcaccgatgcacagaaccggagtcaggccctgctctttcagcaccgcgaattttttcgcgatcagttcgtcagattctttgtggtaagtacgacgttcagagtgaccgatgatgatgtactgtgcgccgatgtctttcagcatagcagcagaggtttcaccggtgaatgcgccggacaggttcaggtccacgttttgcgcacccagcatgatgtggctgccttcagcttcgcgcttcgccatatcgatatacatttccggtggtgcgattgcaaccgcacagccagcaacacctgccagctctttacgcaggttagaaaccagctcgtgaaccatgtggcggctgccgttcagtttccagttacccatcactaaaggatgtcgcattttaattctccacgcttataagcgaataaaggaagatggccgccccgcagggcagcaggtctgtgaaacagtatagagattcatcggcacaaaggctttgctttttgtcatttattcaaaccttcaaggctttcagatagcgccagcttaatcggttcaacagcgaaggtcagccccttttcgccgttgtccgcgacaacataacgcagtgcaccttctgtctcggtgtaataacgtttgtttttccccgccgttagtaggctctgcagttttttctggctttgtgttttggtcattaatggggtgagtgtgcggatcaccgctgccatgtattcctgagctttcgctttcgcggctttttgctctggcccctggatgggtagccaggtcatttgaatgcttttgatttttaaggtaccgcgctccagcgctgtagaagcatacaagttctcattaattttacttgcagcacgagtgagattggctttgtcgggactgctgtcgatggcacgaaattcgttcagtggcaggctgggattctggctgttaaagtcttctcgaaactggctgatggagagatcgaaagtaggggctccagccagcagataaggcgcggtcgttgccgtatctggtgtttgtgcatgcgcctctgttgtaacggttaatgcagaacataagagaaaaaacagcgtacaccctggcttcattgacagtaccttttgttatgactggctccgattaaaacgatatctgtcgcccttgtcaaaagggtagaatcctggaaaagacaaccatcaaggaacttacatgaccatacagcaatggttattcagttttaaagggcgtattggacgccgtgatttctggatttggataggcctgtggttcgcaggcatgctggtgcttttcagtctggcgggtaagaatctactcgatattcagaccgcggcgttttgccttgtgtgcttgctctggccaacagcggcagtaactgttaagcgcttgcatgatcgcgggcgttccggcgcatgggcatttctgatgattgtggcgtggatgctgctggcgggtaactgggcgattttaccgggtgtctggcaatgggcggtggggcgttttgtcccgacgttgattctggtgatgatgcttatcgatcttggtgcgtttgttggcacacaaggcgaaaataaatatggtaaagatactcaggatgtgaagtataaagccgacaataaaagtagtaattaacctttaatatatctcttactgctatttttttccgggattgttatttccacgatgcaaatgacaatacccggaaaatccttctgaactcttcaccttaagcaatatcaaaaaaaatggtaatccataagatcattacttgtttgttcttcccttaacggcgcattattcttaagtcgtaatcgacagagaggcgaatatacagaggtgccctatgaaagatgtcgtagataaatgcagtactaaaggatgtgcgattgatatcggtacggtgattgataacgacaactgtaccagtaagtttagccgcttttttgccacccgcgaagaagcagagtcttttatgaccaaactgaaagagcttgccgccgctacatcctctgcagatgaaggggccagcgtggcctataagattaaggatctggaggggcaagttgagcttgatgcggccttcactttcagttgccaggccgagatgattatttttgagttaagtctgcgtagcttagcttgatggagttgctttagaaggagttaaacatggcttataaacacattggcgtggcaatttccgggaatgaagaagatgccttactggtgaataaagccctggagctcgccagacataatgacgctcacctgacgttaattcatattgatgatggcttaagcgagttgtatccgggtatctacttccctgcaacagaagatattcttcaattgttgaagaataagagcgataacaagctgtataaactgacgaaaaatattcaatggccgaagacaaaactgcgtattgaacgcggagaaatgccggaaacactgctggaaattatgcaaaaagagcagtgcgacctccttgtctgtggtcatcatcacagttttatcaaccgtttgatgccggcatatcgcgggatgatcaataagatgagtgcggatttgctcatcgtgccgtttatcgataagtaaccgcttaccagtaatgctccgctgtcatatggcccggtcggcgacgtaaatgtttcgtcatctgccgggtctctttcagcaactgttgtgtatcgcgcaccatctgtggattgccgcacagcatcacatggctggtttctttattcatcggcaggccaatcgtgctttccagttccccactttcaattaatgccggtatccgtccggtgaggctccccgctgccgtttcccgactgaccaccgtctgaatgcgcagttttccttcgtagcgtttttccagttcctgcatcagtggcaaatagcttaagtcggcggcataacgtgcggcgtgcaccaggaccagatttttgaagcgatctaaatctttacctagttgcagaatgcttaaataagggccaatcgctgtaccggttgccagcatccatagcgtttcgcagtgcggcacttcatcgagcacaaagaatcctgccgcttcgctaaccacctgcacttcatcgcctggtttcagtgccgccagtcgtgggcttaatttgccatcggggacggtgaccaggtaaaactccagatcgggattatcggggctgtttacataggagtaggcgcgctggacgcgttcgccgtcgatttcaaggccaagcttggtaaattgcccggcggtaaacggaagcacgggggcgtgaacggtgagactaaacagggcgtcggtccagttctgcactttagtgactttgcctgttacccaatcagccatgtttttctcctgttttgattgacttgccttatcttcgttctccgaacaaaaaaattccagtcccgaaggactggaaggctcaatcgatcaaatcaatcagaggatgtgcacctgcatttccgggtctttgcgatccagatagtggatggactgaatgcggcgaatggtgcgactcttgccgcggatcagcagcgtttcggtagtcgcgatattgcctttgcggctaatgccttccagcagatcgcctttggtaataccggtggcagagaagatgacgttatcgctgcgcgccatatcgcccaggcgcaatactttaccggcttcgatgcccatcgctttgcagcgtgccagctcctgctcgccaatgcgacgattctcttcgttgtcgcctttgacgtcatgacgcgccagcagacgaccgttcatgtcgccatctaatgcgcggatcaccgccgcagaaactacgccttccggcgcgccaccaataccgtacagcacgtcaacttcgctgtctggcatacaggtgagaatactggccgcaacgtcgccgtccggaatagcaaatacgcgtacgccgagttgctgcatttcagcgataacggcatcgtggcgtggtttagccagaatcgttaccgtcagttcgctcaacggtttgccgagcgccgccgctacattgcgcaggttatccgccagcggcaggttcagatcaatggtgcctttggctcccggcccgacaatcagcttctccatatacatatccggcgcattgaggaagcagcctttatcgcctactgccagcaccgccagcgcgttagcctggcccatcgccgtcatgcgcgtgccttcaatcggatcaacagcaatatctaccgcgtcgccgcgaccagtaccgactttttcaccaatgtagagcatcggtgcttcgtcgatttcaccttcaccaatgacgatggtgccgtcaatgttgacctggttgagcataatacgcatggcgtttaccgccgcgccgtccgcggtgtttttatcgccgcgtcctaaccatttgtagccagccagcgccgcactttcggtgacgcgggaaaattcgatggcaagttctcgtctcatagcaaactctaagcagtaaggaatggcgcgaagtgtagcacaggggaagggagggattattgatgtgtgcggggttgcccccgcacgtttcgggactaccggatgcggcataaacgcttcattcggcatttacattattcgtcgtgttcttcccacgccatcgcgcgtttaaccgcttttttccagcctgcgtaacggtaattacgctcagtggtttcgatgcctggacggaactcgcgctcaatcaccgctttctcttgcagctcgtcgaggttctgccagaagccaaccgccaggcctgcgagataggccgcacccaatgcggtgacttcgcgcacttccgggcgctcaacgcgggtgccgagaatatcggactggaactgcatcaggaaattgtttgctactgcgccaccatccacgcgcagggcgtgcagacggataccagagtcggcctgcatcgcttccagcacgtcacgcgtctgataagcaatagactccagcgtcgcgcgtataatgtggttagcgttcaccccacgagtcagaccgaaaatcgccccgcgcgcatacgggtcccagtacggcgcacccagcccggtaaatgccggaaccacatacacaccattggtgttttgcactttggtggcgaaatattcggaatcgtaggcgtcgttaatcaacttcatttcatcgcgcagccactgaatggatgcgcctgccataaacaccgcaccttccaacgcatagttcacttcgccagtcgggccgcaggcgatggtggtcagcaggccgttttcacttttcaccgctttctcgccagtgttcatcagcataaagcagccagtgccataggtgttcttcgccatcccttctttcacgcacaactgaccaaacagcgcggcctgctggtcaccggcgatcccggagattggaatacgcgtgccgcctttgccgccaatgttagtctgaccgtatacttcggaagaacgacgcacttctggcagcatctcgcgcggaatatccagcacttccagcattttgtcgtcccagtccagggtatggatgttgaacaacatggtacgagaggcgttggtgtaatcggtcacatggacacggccctgagtcattttccagataagccacgtatcaaccgtaccaaacagcaattcaccacgacgtgcacgctcgcgagagccttccacatggtcgaggatccacttcactttggtgccagaaaagtacgggtcaatcaccagaccggtattgctgcggatataatcttctaaaccgtcacgttttaaatgctcgcagatttctgcggtacgacggcactgccagacaatggcgttatagataggcttgccggtttctttttcccagacaatagtggtttcacgctggttcgtaataccgatagctgcaatttgatcggaactgatatcggctttcgccagcacttctaccagcgtggagctttgggtggcccagatttccattgggtcgtgttctacccaacctggttttgggtagatttgctcaaattcgcgctggctcacgctaatgatattggcatcgtgatccattacgaccgcgcgggagctggtggtgccctggtcgagcgcaacgatatattttttttcagtcatgtttaattgtcccgtagtcatattacaggctagctttttgttcactaggagttgtggtttccttttcttccacaacacagatatcgcaaggcaaatggcgaccaatcagtttgcggtaggcaaatgcacctacaatcgcgccaacgatagggccgaaaagcggcaccaggaagtaaggaatgtctctgccgccggtaaaggcgacattgccccagcccgccagccaggcaaagactttcggaccgaagtcacgcgctgggttcatggcaaaacctgtcaatgggcccatagatgcgccaatgaccgcaatcagtagaccaatcagcaagggagccaaagggccgcgtggtacaccgttgccatcgtccgttaacgccaggatcagccccatcagaatagcggtaatcaccatctcaactgcgaaagcctgcacaaaattgatatgaggattagggtaagtagagaaagtgccagccagatcaacactttcaacgctgccgcgaacaatgtgatgagtctgctcgaagtcgaaaaataaattgtagtaaagcccgtaaactaaagccgcagcacagaaagcgccggcaacttgactaacgataaaaggaataactttgcgcttgtcgaaacaggcaaacagccacaatgcaatggtaacagcgggattaagatgcgcgccggaaacccctgcggtcaggtagatggccattgccacccccagtccccaaatgacactgatttcccactgaccaaaagacgcaccagcgacttttagtgctgcaacgcaacccacaccgaagaaaatcaacaacccggtaccgaggaattcagcaatgcactggcctttcaaggtacttgtttgactcataatcggatcctgaagagttaatgtttgttgtatgcgtgaaagtcacggacctccacgatgcttgtaggcatgctgtaaacttatcgttaacgagcaaaaacgagaaatatcgaacttaaaatgtgtgtgcctcgtcataaaatgagcgttatcgcgccatttattccatctgattgtacatgatgcatgtttgttagatcattcgcgcaacaaatttattaacattttcgattgatgtggattatgtcaccaggagaaggatgaaaagtgtggcaaaccgtaatctgcaaggcgtgccgctggacagcgatggcgcggcttcatacaatcggagctaactaaagtgcgctcgtatttattaaggcgtcaccggtaatcgggacgaggatttttatccatcaacgccttgcaattcaggagaggtatgacaatgagtttagaagtgtttgagaaactggaagcaaaagtacagcaggcgattgataccatcactctgttgcagatggaaatcgaagagctgaaagaaaaaaacaacagtctgagccaggaagttcaaaatgcccagcatcagcgcgaagagctggagcgtgagaacaaccatctgaaagaacagcagaacggctggcaggaacgtctgcaggccctgctgggtcgcatggaagaggtctgattacgcttcatcttccgcgtaatttctttactgtgtaggccaacaggtaacgcagaaaaaaggcaccttgcggtgcctttcttatcattcaatatccagcggatcttcactaagaataatcccggtattgtcggcataaagatggtcgccggagaagaaggtgacaccgccaaaattgacgcggacatcgctttcgccaatgccttcgccagcggcaccaaccggaattgccgccatcgcctggatgccgatatccaactcttccaggtcatctacctgacgcaccgcgccgtaaatgaccagaccttcccattcattttgtactgccagacgcgccagttcagcatcgaccagtgcgcgacgaacagaaccaccgccatcgacgacaagaacacgaccacggccattctgttcgagcagatcgtacagcaacccgttgtcctcgaaacattttaccgtgattatttgtccgccaaagctcgcccgtccgccaaagttggagaacagcggttccacgacgttaacatcttcttgatagatgtcacaaagctcggaagtatcgtatttcataggcttaacattcagttgctgcgagaattttcagtatatcgcgctatgtgggctgttggcaaaatcatcaattgttaattgatatttgtcagttatgctgcccactggcttaggaatatccctaaaacaaacagcaggttagtcagtaacgctcccttgacagtacgttccagcattggtcgcatcgccaccgggtccatttcccgcatcacataacgggcttgcttcaccagtaatggtgccgccagcaggaacagccagccccacaggctatgcaggctaaagagattaaacagcgccagacacaccaggctgcccatcagcaggcaggcatgataacgacgcgcgttcacttcacctaagcgcaccaccagcgtgtttttgccattttcgcggtcgctattgatatcacgcaggttattaatattcagtactgccgttgccagcaggccgcatgcggtcgccggaaggatcagtgccggaatcaatgtatgagcctgtaaataccagctccccatgacactcaaccagccaaagaaaaccagtacggaaatatcacccagaccgatataaccataaggacgattgcccacggtgtaggtgatagcggcaatgatgctcaacccgccaagaatcaggaaaccgacaaaatcggccagcgtatggcatgccactgcaaccagtgccagcccggagagacagatgagcacgacggtaataatgagcgcccgtttcatctcttgctgggtaatgacccctttttgcatgccgcgtagcggcccaatgcggtcaggtttatcgctgccttttaccgcatcgccgtaatcattggcgaggttagaaaggatctgtaatagcccggcggtaattagtgccagcagggcgaccagcggatcgaagtgaccttgccaccatgccagcgctgtcccgacgataattgcagcaaaggcgagggggagggttttaggtcgtaaactttccagccacgcctgagttcggctaatttgttgttcagtcataatacgcgccaataaaaatggggcctttcagccccatcaaacaatgatgaaaatgattgaacgcgattataggataaaacggctcagatcttcatctgccaccaacgcatccagatgtttgctcacataatctgcgtcaatagtgatattttgaccgcttaaatcgctggcgtcgtaggaaatctcttccattaaacgctccagaacagtgtgtaaacgacgagcaccgatgttttcggtagattcgttcacctgccatgccgcttccgcgatgcgtttaataccggagtcggtaaactcgatatttacgccttcagtcgccatcagtgctttgtactgcacggtgatagaggcattcggctcggtcagaatacgctcgaagtcgctggtggtcagcgcctgcagttcaacgcggattggcagacgaccttgcagttccgggatcaggtcagacggtttcgcaatctggaacgcgccagaagcgataaacagaatgtggtcagttttgaccatcccgtgtttggtggaaacggtgcaaccttctaccagcggcagcaggtcacgctgaacgccttcacgagaaacatccggaccggaagactcgccgcgcttacagattttgtcgatttcgtcgataaacacgatcccgtgctgctcaacagcgtcgatagcgtcttgcttcagctcttccgggttcaccagtttcgccgcttcttcttcaatcagcagcttcatggcgtctttgattttcagcttacgcgctttttgcttctggccgcccaggttctggaacatggactgcagctggctggtcatctcttccatgcccggaggagccataatttcaacgcccatcggtgctgcggcaagatcgatctcgatttctttgtcatcaagctggccttcacgcagttttttgcggaatgcctgacgagcagcggacggttcctgctgctgttcggtctgtccccagttgtttttagcaggtgggatcagcacgtcgagaatacgttcttctgccagttcttcagcgcgataacggtttttctcgatagcctggacgcgtaccattttcacggcggcatcggtcagatcgcgaataatagaatccacttccttaccgacgtagcccacttcggtgaatttggtcgcttcaactttgatgaacggcgcattcgccagcttagccagacgacgggcgatttcagttttaccgacaccggtcgggccgatcatcaggatatttttcggggtcacttcatggcgcagctcttcgttgagctgcatgcgacgccagcggttacgcagagcaatcgccacagaacgcttggcgttgtcctggccgatgatgtgcttatccagttcgctgacgatttcgcgtggggtcatttcagacatgggagatccttacgctttgtagcttaattcttcgatggtgtggaaatggttggtatagatgcaaatgtcgcctgcaatatccaacgccttttcagcaatttcacgggcgctaagttcagtgttttctaacagcgcgcgcgccgcagcctgggcgtaagggccgccggagccgatagcaataagatcgttttctggctgcaccacgtcaccgttaccggtgatgataaggcttgcagtttcatccgcgactgccagcagtgcttcaagtttgcgcagcatgcgatcggtacgccagtcttttgccagctcaacggcggctttgaccagatggccctgatgcatttccagtttacgttcaaacagttcgaacagcgtaaaagcatccgcagtaccgcccgcaaagcccgcgatgactttgtcgttgtacagacggcggacctttttcacgttgcctttcattacggtattgcccaacgtggcctgaccatcaccagcgatgaccacatggccgttacggcgtacgcttactatagttgtcacgagctgaccccttggttacgaatacagagtacaaaccccgtacaaaagtacggggcataatgcaattatagatgggggggattttgagggtttcaacccccggcggcgagccgaatgcagtttgtatgacccgccatcttcaaccgattgagggtgctgtctgcgttctctttgcctttcaccgggccaatgaccacacgattccagccattgttggtggtgattttgctgtcaaagccttcgaacgccagctgagcacgtaccgtctctgcctgttccgcgcctctgaagctaccgcactgcaccatccagcggcgttcgtcttttttctccgccgtcggttttggcgcgtcagcggcacgagcaactggcgcagcttgctgcggcttgctctgcgcagtcgtgtgcgcaggagtttgcagcagatcctggtacggctgctgagaagaagccggtttagactggcgcggttgcgcctgtaccggtgcggcttggctcgtacgcgtctgctgctgccagctttgttcagtcgtacggctctgctgagccaggcgttgctgttccgctaattgctgcgcctgacgttggcgctgtagcgtttgctgacgctgttccggcgtctgttcattccacggaacttcaaccagctgcgttggctgctggcgcatatcagcctgcatttgttcaagaagctgacgttgttctggtgtcagttgctccggcgttttcacttcaccaccggcagaaggttctgtgggcgcacgcactcccggctggcgactttccagctctttaatgtagcgccagcgttcttctggttttggtggtagtccgtttccggtcactttctggctttgcagcgtctcggactcttctttcttgtgatgcgtaatgaagtacagaccaccgataaaggtcacaagaacggcggcagcaatagcgaccatagcgggagaaaccgcaggcagatttcgttgctttttccgactggtgctcttttttcgccggctaggtgccggttggctgcggcgtacataatctcgttgtgccactatcgtttcgctgtatttattcgttcgtcagcccgccatgttacttaagcggcgggcctttgaccagtcacggcagtcttaaaggtttactttaaggtaacgcgcgtgtacttccccggatgataagttcgcagtccattaaacgagagccactgccaacgtgttgcccctgcatttgatcaagcaataacagcatagcttcccgaccgatttcgtaacgcggctgcgcgatggttgtcagcggcggatcacaaaattgcgtcaggtcgatgttatcaaaaccgattatggaaaggtcttccgggactttcagcccctggcgttttgcctgagaaagtgcgccgagcgccatcacatcgctatggcagaagacagcagtaggcggttgtggaagatcaagcagctgctgcatcgctttgcttccggcttcgaaggtgaagtcgccacgggcgatgtattgcggatcaaccataatgccgcagcgacgcagcgcctgaacatagccttgcaggcggtagtgacacagcggcatctcttcgggaccggctatacagccaatccgtttatgcccttgctcatataaataatttactgcatcaaatgcggcggtcagattgtcgatatgaactgtaggcagctccagctccggtgcaaattcgttcgccatcaccatcggcggcagattacgctgttcctcaatgctggcatcaaacggcagcctactacccagcaacaacatgccatcaatttgcttggtgatgatcaaatcgataaaggttttttcctgctgattttgatgcgcacagtcgccaatcagcaccagatatccgtgatttgccgccgtaacttcgataccgcgaataatttcgctaaagaagggatcgcagatatccgggacaatcaccagaatggtgcgggattcattacgcttgacgttgcgccccataggctgcggtaaataacccacttcccgggccgctttttcaacccgattacgggtggcctgggagactttatcgggattcattaatgctcgggagacggtcgctgtagagacttttgccttgagggcaacgtctttcatggtcgcggcagtttcctgcttcttcgctttcacactcactcctcgcctggcacgtcaggcgtactacatccatgtttacttcacatcggcaacatttttagcagatagcgcgtgaaaacggttacagaattttcatgaaaagtgtgatgaatattgaatttttcgatccgcctcgcatcgtgagcggtttaaccctcaatcggatcaacatccagcacccatttcaccttacgggaatccggtattgtattgatgagcgccagcgtaccgttaatgatgtgttgcaagcgcacgcgggaagggtgctgcaacaatatctgccagcgccagcgaccgccacgtttaggtgccagagccggaaccggaccgagaacccacagtttctcgtctgccagtgggctggagaggatcagattacgcagttgttgcaggaacaatggcgcgtgctgattgttatgatcttccgcacgcacaatcacatggctggtccacggcggtagctgcatcattcgccgctcagccagcgcctgttcggcaaaggcgtcgtagcctttatagagcaacgtttgcaacagaggatgttccggatggtgcgtttgcagcaccacttcgccctgtttacccgcacgcccggcacgaccggcgacctgggtgtaaagctgagcgaaacgctctgcgctgcgaaaatcggcagaaaacagcgcgccgtccacgtccagtaatgcaaccagcgtcacatccgggaaatggtgacctttcgccagcatttgtgtaccaatcaaaatccgcgcgccgccgcgatgtacttctgccagttgctgttccagcgcccctttgcggctggtggtatcgcggtcgatacgagaaatgggcacgccggggaacaacggcgcgagcgtctgttcaagctgttcggtgcccagccccacggggaccaggtgcgtggaaccgcaggaagggcactggcgcggcaccggacgctgactgtcacagtggtggcagcgcagatggtgctgcgcctgatgcagcgtgtagtagtgatcgcaacgtgggcattcggcaatccagccacagtcgtggcacagcagtgcaggcgcaaagccacggcggttaagaaagagaatgacctggttatcagcctgtaaatgctggcgcatacgagtgattaacgccggagccagacctgcctgcaccttctgaccttttaaatccagcacatgttgaattgccggacgcgcattccctgcccgacgggtcaggcgcagcaggcggtattttttctgctggacgttgcataacgtttccagcgcgggcgttgcggagccaagaataatcgggatttgctcgctgtgcgcacgatacaccgccaggtcgcgggcatgatagcgccagccttcctgctgcttgtaggagctgtcgtgctcttcatcaatgacaatcacgccgagatttttaaacggcgtaaacagcgcggagcgggtgccgatcacaatcgccgcctcaccatttttcgctttcagccacgcgctaagacgctcgctgtcgttcaggccggaatgcagaacttccacgggggcattaaaacgttcacgaaaacgggcgatagtttgcggtgtcaggccgatttccggcaccatcaccagcgcctgtttgccctgagcgagcacgttttccagtacgctgagataaacctccgttttaccggaaccggtaacgcccgccagcagccaggcagaaaaagtatctgccgcgctatgaattgcgccaacggcggtggcctgttcggtattcaatcgcaaccgctcaccagaaacggcatagttcgttcgccagtcgctaaactctggtgtttcacttgctaaatcacacagaccttttttgcgtagcgcctgcaacgcggcatcattaaattcgagcgtggcgacctggtcgcgccagattttgccttgccgtaacgccgccagcgcctgttgttgcttgggggagcgtttcaggctgttcagatccaccgcctggccttgttcagtggcaaaccagtaccacatcggcgcgttcgccgcaggccgcccctggcgtagtaaaatcggcaaggcatgaaacagcacatcgccaatcggatgatgatagtaatctgccgcccatagcagcaatcgccagacggagtgagtaaacaccggctcactatccagcacttcgactaccgcttttagctcattgagcggcagttcgctggcatcgctaacacttaccacaatcccgatgcgctcctgctgtttgccaaacggcacgcgcacgcgacacccagctttaaccgtcatgccttctggcagcagatagtcaaaggtacgaggaagcggaacgggcaaggcaacgtgggcaacgggcatagcatcatcctgacttgaaattcggtgggttagtatacacattgccgtagaagagtgcggatcagtttgcatacgctggttaatttctgtatgatttcgcgccttcgtacgaaatgatcgtattgaagctatacttttaacatcgcgtggtgtctggcgttagggctggaagagcgacgcggccttaaaccgaggttttcccatgaaaaaagatattcacccgaaatacgaagaaattactgctagctgctcttgcggtaacgtaatgaaaatccgctccaccgttggtcatgacctgaacctcgacgtgtgcagcaagtgccacccgttcttcactggcaaacagcgtgatgttgctaccggtggccgtgttgaccgcttcaacaagcgtttcaacatcccgggcagcaaataagaccggatttccgaaaaaagcgccgcacggcgctttttttgtgcctgaattttggtcgtattaccagctaaacagcggccattctttggcgaccgtggtgagttgtggcgcatcgaaaacggcttgtgggctgaccaccgtttcctcaagcggaatattcttgccgtaacgttctttgagctttgcctgaacttgtgggctgctcaggtcgaactctttcaacttctgctgctcgcccacgcgcattcccagcgcgttctggtaaaccttccacaccacttcgctacagtactggcgatcgtcgctccaactgaagctgaaatcatacggtttaccgagataacgttttgccgtttgcgccagtttttgctgttgttcaacactcagtccgccttcaacgcggcgaacaacgtatttgcccttttcaccatgggcgatccactgcttgagcggggtgtatttcaccgggccgactgcttcaaaaacgtagggctttttgttgcgtatcaccagcataccggtgtggctataatcggtatgggtcgccagttggatcgctttactttggctactgcgagagatctgaaagatgatgtcgccggtttgtggctgccaggcaaaggcaggtacagaaaccagcaggctgaggatcagcagcctgtttttcatagttaaacgtccatgtataaaaagcggtgggtcgcagacaacgtgctcgttgtttatgccggatgcggcgtgaacgccttatccggcctacaagttcgtgcaaattcaataaattgcaatatgacgtaggcctgataagcgtagcgcatcaggcgattccactccgcgccgctcttttttgctttagtattcccacgtctccgggttaatccccatctcacgcatgatctcttttgccgcttccgggatttcgtcgctgcgctctttacgcagatcggcatcatccggcaaaggttgcccggtaaaggcatgcagaaacgcttcgcacagcagctcgctgttggtagcgtgacgcaggttgttcacctgacgacgcgtgcgttcatcggtgaggatttttaacaccttaagaggaatggaaaccgtaatctttttgacttgttcactcttcttgccgtgctcagcgtatgggctgatatattcgccgctccattcagccatgagatacttaatcctcttcgtcaataaattgagaccagaccacacagttgatgtgggtactgaccgtaaacccgcatagtttaccgtacaggcgttaccgtgacatcgtgtaatgcacctgtcggcgtgataatgcatataattttaacggctatttgggatttgctcaatctatacgcaaagaagtttagatgtccagatgtattgacgtccattaacacaatgtttactctggtgcctgacatttcaccgacaaagcccagggaacttcatcacatgacgcgtaaacaggccaccatcgcagtgcgtagcgggttaaatgacgacgaacagtatggttgcgttgtcccaccgatccatctttccagcacctataactttaccggatttaatgaaccgcgcgcgcatgattacagccgtcgcggcaacccaacgcgcgatgtggttcagcgtgcgctggcagaactggaaggtggtgctggtgcagtacttactaataccggcatgtccgcgattcacctggtaacgaccgtctttttgaaacctggcgatctgctggttgcgccgcacgactgctacggcggtagctatcgcctgttcgacagtctggcgaaacgcggttgctatcgcgtgttgtttgttgatcaaggcgatgaacaggcattacgggcagcgctggcagaaaaacccaaactggtactggtagaaagcccaagtaatccattgttacgcgtcgtggatattgcgaaaatctgccatctggcaagggaagtcggggcggtgagcgtggtggataacaccttcttaagcccggcattacaaaatccgctggcattaggtgccgatctggtgttgcatagttgcacgaaatatctgaacggtcacagtgacgtagtggccggcgtggtgattgctaaagacccggacgttgtcactgaactggcctggtgggcaaacaatattggcgtgacgggcggcgcgtttgacagctatctgctgctacgtgggttgcgaacgctggtgccgcgtatggagctggcgcagcgcaacgcgcaggcgattgtgaaatacctgcaaacccagccgttggtgaaaaaactgtatcacccgagcttgccggaaaatcaggggcatgaaattgccgcgcgccagcaaaaaggctttggcgcaatgttgagttttgaactggatggcgatgagcagacgctgcgtcgtttcctgggcgggctgagcttgtttacgctggcggaaagtttagggggagtggaaagtttaatctctcacgccgcaaccatgacacatgcaggcatggcaccagaagcgcgtgctgccgccgggatctccgagacgctgctgcgtatctccaccggtattgaagatggcgaagatttaattgccgacctggaaaatggcttccgggctgcaaacaaggggtaaaaatgagtgtgattgcgcaggcaggggcgaaaggtcgtcagctgcataaatttggtggcagtagtctggctgatgtgaagtgttatttgcgtgtcgcgggcattatggcggagtactctcagcctgacgatatgatggtggtttccgccgccggtagcaccactaaccagttgattaactggttgaaactaagccagaccgatcgtctctctgcgcatcaggttcaacaaacgctgcgtcgctatcagtgcgatctgattagcggtctgctacccgctgaagaagccgatagcctcattagcgcttttgtcagcgaccttgagcgcctggcggcgctgctcgacagcggtattaacgacgcagtgtatgcggaagtggtgggccacggggaagtatggagcgcacgtctgatgtctgcggtacttaatcaacaagggctgccagcggcctggcttgatgcccgcgagtttttacgcgctgaacgcgccgcacaaccgcaggttgatgaagggctttcttacccgttgctgcaatagctgctggtgcaacatccgggcaaacgtctggtggtgaccggatttatcagccgcaacaacgccggtgaaacggtgctgctggggcgtaacggttccgactattccgcgacacaaatcggtgcgctggcgggtgtttctcgcgtaaccatctggagcgacgtcgccggggtatacagtgccgacccgcgtaaagtgaaagatgcctgcctgctgccgttgctgcgtctggatgaggccagcgaactggcgcgcctggcggctcccgttcttcacgcccgtactttacagccggtttctggcagcgaaatcgacctgcaactgcgctgtagctacacgccggatcaaggttccacacgcattgaacgcgtgctggcctccggtactggtgcgcgtattgtcaccagccacgatgatgtctgtttgattgagtttcaggtgcccgccagtcaggatttcaaactggcgcataaagagatcgaccaaatcctgaaacgcgcgcaggtacgcccgctggcggttggcgtacataacgatcgccagttgctgcaattttgctacaccagtgaagtggccgacagtgcgctgaaaaacctcgacgaagcgggattacctggcgaactgcgcctgcgtcaggggctggcgctggtggcgatggtcggtgcaggcgtcacccgtaacccgctgcattgccaccgcttctggcagcaactgaaaggccagccggtcgaatttacctggcagtccgatgacggcatcagcctggtggcagtactgcgcaccggcccgaccgaaagcctgattcaggggctgcatcagtccgtcttccgcgcagaaaaacgcatcggcctggtattgttcggtaagggcaatatcggttcccgttggctggaactgttcgcccgtgagcagagcacgcttagcgcacgtaccggctttgagtttgtgctggcaggtgtggtggacagccgccgcagcctgttgagctatgacgggctggacgccagccgcgcgttagccttcttcaacgatgaagcggttgagcaggatgaagagagcttgttcctgtggatgcgcgcccatccgtatgatgatttagtggtgctggacgttaccgccagccagcagcttgctgatcagtatcttgatttcgccagccacggtttccacgttatcagcgccaacaaactggcgggagccagcgacagcaataaatatcgccagatccacgacgccttcgaaaaaaccgggcgtcactggctgtacaatgccaccgtcggtgcgggcttgccgatcaaccacaccgtgcgcgatctgatcgacagcggcgatactattttgagcatcagcgggatcttctccggcacgctctcctggctgttcctgcaattcgacggtagcgtgccgtttaccgagctggtggatcaggcgtggcagcagggcttaaccgaacctgacccgcgtgacgatctctctggcaaagacgtgatgcgcaagctggtgattctggcgcgtgaagcaggttacaacatcgaaccggatcaggtacgtgtggaaagcctggtgcctgctcattgcgaaggcggcagcatcgaccatttctttgaaaatggcgatgaactgaacgagcagatggtgcaacggctggaagcggcccgcgaaatggggctggtgctgcgctacgtggcgcgtttcgatgccaacggtaaagcgcgtgtaggcgtggaagcggtgcgtgaagatcatccgttggcaagtctgctgccgtgcgataacgtctttgccatcgaaagccgctggtatcgcgataaccctctggtgatccgcggacctggcgctgggcgcgacgtcaccgccggggcgattcagagcgatatcaaccggctggcacagttgttgtaatttcagaaatttaataatgcccggtactcatgttttcgggtttatggtttctaatgaaatatattgaattatcataggattaggccggattaagcgtttacgacgaatccggcaagaagcaataagtacatggttagtttatatttgcagtccggtttgctttgcataccggattttctttttcttaccatcctgaagttttttcatcttccctgatttttcctcaccatcattggtcatttttcggttgacgcccttcggcttttccttcatctttacatctggacgtctaaacggatagatgtgcacaacacaacatataactacaagcgattgatgaggtaaggtatgagcttttttcacgccagccagcgggatgccctgaatcagagcctggcagaagtccaggggcagattaacgttagcttcgagtttttcccgccgcgtaccagtgaaatggagcagaccctgtggaactccatcgatcgccttagcagcctgaaaccgaagtttgtaagcgtgacctatggcgcgaactccggcgagcgcgaccgtacgcacagcattattaaaggcattaaagatcgcactggtctggaagcggcaccgcatcttacttgcattgatgcgacgcccgacgagctgcgcaccattgcacgcgactactggaataacggtattcgtcatatcgtggcgctgcgtggcgatctgccgccgggaagtggtaagccagaaatgtatgcttctgacctggtgacgctgttaaaagaagtggcagatttcgatatctccgtggcggcgtatccggaagttcacccggaagcaaaaagcgctcaggcggatttgcttaatctgaaacgcaaagtggatgccggagccaaccgcgcgattactcagttcttcttcgatgtcgaaagctacctgcgttttcgtgaccgctgtgtaagcgcgggcattgatgtggaaattattccgggaattttgccggtatctaactttaaacaggcgaagaaatttgccgatatgaccaacgtgcgtattccggcgtggatggcgcaaatgttcgacggtctggatgatgatgccgaaacccgcaaactggttggcgcgaatattgccatggatatggtgaagattttaagccgtgaaggagtgaaagatttccacttctatacgcttaaccgtgctgaaatgagttacgcgatttgccatacgctgggggttcgacctggtttataaatagtgtggcttttgtgaaaatcacacagtgatcacaaattttaaacagagcacaaaatgctgcctcgaaatgagggcgggaaaataaggttatcagccttgttttctccctcattacttgaaggatatgaagctaaaacccttttttataaagcatttgtccgaattcggacataatcaaaaaagcttaattaagatcaatttgatctacatctctttaaccaacaatatgtaagatctcaactatcgcatccgtggattaattcaattataacttctctctaacgctgtgtatcgtaacggtaacactgtagaggggagcacattgatgagcacgagtgacgatatccataacaccacagccactggcaaatgcccgttccatcagggcggtcacgaccagagtgcgggggcgggcacaaccactcgcgactggtggccaaatcaacttcgtgttgacctgttaaaccaacattctaatcgttctaacccactgggtgaggactttgactaccgcaaagaattcagcaaattagattactacggcctgaaaaaagatctgaaagccctgttgacagaatctcaaccgtggtggccagccgactggggcagttacgccggtctgtttattcgtatggcctggcacggcgcggggacttaccgtagtatcgatggacgcggtggcgcgggtcgtggtcagcaacgttttgcaccgctgaactcctggccggataacgtaagcctcgataaagcgcgtcgcctgttgtggccaatcaaacagaaatatggtcagaaaatctcctgggccgacctgtttatcctcgcgggtaacgtggcgctagaaaactccggcttccgtaccttcggttttggtgccggtcgtgaagacgtctgggaaccggatctggatgttaactggggtgatgaaaaagcctggctgactcaccgtcatccggaagcgctggcgaaagcaccgctgggtgcaaccgagatgggtctgatttacgttaacccggaaggcccggatcacagcggcgaaccgctttctgcggcagcagctatccgcgcgaccttcggcaacatgggcatgaacgacgaagaaaccgtggcgctgattgcgggtggtcatacgctgggtaaaacccacggtgccggtccgacaagtaatgtaggtcctgatccagaagctgcaccgattgaagaacaaggtttaggttgggcgagcacttacggcagcggcgttggcgcagatgccattacctctggtctggaagtagtctggacccagacgccgacccagtggagcaactatttcttcgagaacctgttcaagtatgagtgggtacagacccgcagcccggctggcgcaatccagttcgaagcggtagacgcaccggaaattatcccggatccgtttgatccgagcaagaaacgtaaaccgacaatgctggtgaccgacctgacgctgcgttttgatcctgagttcgagaagatctctcgtcgtttcctcaacgatccgcaggcgttcaacgaagcctttgcccgtgcctggttcaaactgacgcacagggatatggggccgaaatctcgctacatcgggccggaagtgccgaaagaagatctgatctggcaagatccgctgccgcagccgatctacaacccgaccgagcaggacattatcgatctgaaattcgcgattgcggattctggtctgtctgttagtgagctggtaagcgtggcctgggcatctgcttctaccttccgtggtggcgacaaacgcggtggtgccaacggtgcgcgtctggcattaatgccgcagcgcgactgggatgtgaacgccgcagccgttcgtgctctgcctgttctggagaaaatccagaaagagtctggtaaagccagcctggcggatatcatagtgctggctggtgtggttggtgttgagaaagccgcaagcgccgcaggtttgagcattcatgtaccgtttgcgccgggtcgcgttgatgcgcgtcaggatcagactgacattgagatgtttgagctgctggagccaattgctgacggtttccgtaactatcgcgctcgtctggacgtttccaccaccgagagtctgctgatcgacaaagcacagcaactgacgctgaccgcgccggaaatgactgcgctggtgggcggcatgcgtgtactgggtgccaacttcgatggcagcaaaaacggcgtcttcactgaccgcgttggcgtattgagcaatgacttcttcgtgaacttgctggatatgcgttacgagtggaaagcgaccgacgaaagcaaagagctgttcgaaggccgtgaccgtgaaaccggcgaagtgaaatttacggccagccgtgcggatctggtgtttggttctaactccgtcctgcgtgcggtggcggaagtttacgccagtagcgatgcccacgagaagtttgttaaagacttcgtggcggcatgggtgaaagtgatgaacctcgaccgtttcgacctgctgtaatctgaccccgttcagcggctgcttgctggcagtcgctgaacgttctttaccagcgtatagtgggcgaacgaaaactacacactggatctctcatgtctgccgcaggaaagagcaacccactggcaatcagtggcctggttgtgctcacacttatctggagttatagctggattttcatgaagcaagtcaccagttacatcggtgccttcgactttaccgccttacgctgcattttcggcgctctcgttttattcatcgtccttttattacgtggtcgcggaatgcgcccgacaccgtttaaatacaccttagccattgccctgttacaaacctgcgggatggttggtctggcgcagtgggcgttggtcagcggaggtgcggggaaggtggcgatcctgagctataccatgccgttctgggtggtgattttcgccgcgttgtttctcggtgaacgcctgcgacgtgggcaatatttcgcgattctgattgccgctttcggcttatttttggtgttgcagccgtggcaactcgatttctctagcatgaaaagtgccatgctggcaatcctctccggcgtcagttggggggcgagcgcgattgttgctaaacgtctgtatgcccgtcatccgcgcgtggatttattgagcttaacatcctggcagatgctgtatgcggcgctggtgatgagtgtggtcgctttactggtgccgcaacgtgaaattgactggcagcccaccgtgttctgggcgctggcctacagtgcgattctggcgacggcactggcgtggagcttatggttgtttgtattgaaaaacttgcctgccagtattgccagcttaagcacactggccgttcccgtttgcggcgtactcttttcctggtggctgctcggcgagaatccgggggccgttgaaggtagcggtattgtgctgattgtgctggcactggcgctggtgagccgtaagaaaaaagaagccgtcagtgtaaaaaggatctgaattttttcttcatgtggggcgatctcttatttaacaaaataacgataatgccccaccatccgccagttaaacagcacatcttcttcctgcgcgcctgcgccaatgttatgtatcaccagcggcgtaccgtcgcgggcgaagccatcactaaccaccccaatatgtgccagcccgttatccagtcgccaggagacaatatcgcccgcttgatagtcactggggttcttgctggtggggcgtgttttatcatggcggctaaaccaggtttccagattaggcacccgacggtgatcgatgttgctgtccgggcgctttaacttccatttttgcgggtactcagcaaaattcttcgccatatcttcgtgaaccagtttctgcaaatcgaccttctggctgcgcaatgcgcggatcaccacatcggaacatacaccgcgttcttgcggaacatcaccgccaggataagtaagctgcacatacgccggatcgtaaaatagcgtgctgccaatttgctgtctggcaccgtctgcgatggcaaggttggtattggcctggatttgtaccacggttggtggaacggcgggagattttaaggagtggctggtaaatgccgttagcaggctgagcagcgccagactagctttcatctggttcgtccgtgaaaataagagtcacagattcgaccttccgggctaacgattgttctgtagagaaaatgtccagaagcggataaaaaattcctgaacaacgtgggagtttcagattactggcacagagtgccggatgcggagtgaacgccttatccggcctacaaaagcacgcaaattcaatatattgcagagattgcgtaggcctgataagcgtagcgcatcaggcaattttgcgttcaaactcccggacaagccgggagtttggagtaggttattcccactcttgcaggaaacgctgaccgtactggtcggctaccagcagagcggcgtaaacctgatctggcgtcgcgccgccaggcatgttgtgaatggtttcaccttctgcacatgccgcttctgccacaattcgcattttcgccgggacatcttctttaatatccagttgagcgagagttattggcaaacctaccgcatggctaagggcagctacggtttcgatttcctccaccggcgcattttccagaaccagctgcgtcagcgtaccgaatgccactttttcaccgtgataatagtgatgcgcgtccgggatagcggtcaggccgttatgcactgcgtgcgccgcagccagaccaccactttcaaaaccaacaccgctcaaataggtgttcgcttcaatcacgcgctccagcgccggagtcactacatgctgttcggcagcaagcatcgctttttcgccttcttccagcagggtgttgtagcacagttcagccagtgccagcgcagcctgggtgcacttgccgcccgccatggtggtcgcgccgctacgagagcaggcacgcgcttcaaaccaggttgccagcgcatcgccgatacccgccgctaacagacgtgcaggtgcgccagcgacgattttggtgtcgacaatgaccatattcgggttatttggcaacagcagatagcggtcaaactcaccctcatcggtgtagataacagacaatgcgctgcacggtgcatcggtagaggcgatagtcggtgcgatcgctaccggaacacccatgaaatgtgccagtgctttggcagtatcgagggtttttccgccaccgataccgagaattgcgccacactgcgcagtctccgcgatgccacgcagacggtcgatctcattttggctacattcaccgccaaacggcgcaatttctactaccagtccagcatctttaaagcttttctcgacagtggattgagcaaaacctaaaacaaatttgtcacccaccactaaccagcgttctgccagcggcttcaggtattcgcccagacgattaatcacatcagcgccctggatgtatttacccggactttgaataatgcggtccataattgctcctttagagatgagtagtgccaaatgcggcattccagtcgtgttcgaacttctctatagcactctctaccgcaggggtgttgagcatttgttgcgctacatctaagggcagggtgatggattcacatcctgccagtaaacagtccagcgcctgacgcggcgttttaaagctggctgccagcaccatgctttctggcgcgtgcatttctaacagcgtttgcagctcctgaaccgtacgaatgccgtctccgccctgggcatctacgcggttaacatacggagcaacgtattttgcccctgccagtgcggctaataacccttgtgcggcgctatatacagcagtgccaagtgtagtaataccctcttttttcagtattttaattgctgccagaccttcggaagtcaccgggattttcaccacaatacccggaatagcgtcgcgcaggcgcttcgcttcttccaccatcccctgcgcgtcgcggctcatggtctgagcaaacagaatgccctcatcaccaatcgctttttgcagacgcggcagcacttcccatatggactccttgctggcagcgataatgctcgggttagttgtcaccccggcaatggggaatatgcgtgccagacgttcgacttctgcgacgttagcggtgtccagatacagttccatgatgtttccttttacagttccagttcatgttgcagcaggctggcgatagcgtcggcagaggcggcgttaaccagcgcgttacggaattcttcgtgcatgatgcggcgagcgaggcggctgaaaatgcgcatatgctgatcgcccgcagcgtgtttgttcagggttaacataatgatgaattgcgcttcatcatcgccccagcgcaccggcgcttgcagacgcgccacgctgatggtggattgctcaatgtgttcacttttgctgtgtggaatggcaaaactaaagcccagaccggtagagaaaacggcctcgcgcgcccacaagtcggcttccagtttacgcggatagcggcagcggcccgccagcagcaggttatcggtcatgcctttgagcacttcttctttgctgcgccagtcgctttccagtgtgatgcactcggcggtgaccagcggtgcgtcttgttgggtcatgcggaattgcgccagcaggtgttctacttccaggctagtacggcaggccattgcctggttgagcaacttgcggcactcacggctatcaagttgcgccatccgagctttcgccgccggaatacttggtgcgctcatgctgagttcatccagccctaagccgaccagcaacggcagcacggaacctttcgctcccagctcaccgcacagaccaatccatttgccctggcgatgcaccgcttgcacggcgtaatcgagcgcccgcaagaatgccggattcaggctgttgtagtgacgagtaaccttagcgttatcgcgatccaccgccagcagatactgcgtcaggtcattactaccaatactaaagaaatcaatctcttcgcagcattgatcgatgatgaacatcacgctcggcacttccagcatgatgccgagctggattttctcatcaaacggaatgtgttcgttacgtagttgctgtttggcttccgccagtttttctttcacccataagatctcttccatactggagatcatcgggatcatgattttcaggctgccgtgagcggaggcgcggaggatgctccgtagctgcgtggtaaacaagctcgcgtactcttcataaatacgcacggcgcgataaccgaggaacgggtttgcctctgcgggaatgttcagataatcaacgggtttgtcgccgccaatgtccatagtgcgcacaataatgctgcgtccgttggcggattccagcgcctgacaaaaaatgttgtacaactcgctttcgcccggtgcgctggtgcgatccatatagagcatttcagtgcggaacaaaccaacgccttccgcaccattgccgaatgcggcctgcgcttccacggagtgagcgatgttagcggcaatttcaatgcggataccgtcagcggtacgggcttgttgggtcagccagacacgctgttgctcacgcagggcgtcctgtacgcgggcttcttgctgataataacgagctacggcttcccctggctcaaccacaatcgccccggcgttgccgtcgatataaatcgtttgttgctgccacggagtaagggcatcaatatccacaccaaccagcgttggaatgttgaagctacgggcaaggatcaccgtatgactggtggtgccgccgcttttgagcaacaatcctttgaggtgatttttatccagttcgaggaactggctgggggtcagttcatcagccatacaaatggcgggctgcgtcagtttgcccggtgccgggaagcgttgctcaccgtagatttgctggagtaactggaagcagacgtcgcgtacgtccagggcacgttcttgcaggtagctgctgctggaacgggaaaactcttcgcaaaagtgattcgcgctggcaacaattgcttcggcgcagcttaatccggcgctgacgcctgccagtaaatgttcgcgcagggaagtatcgccagccagggatcggtgagcttccagaatcgcgctggtagcaccgtcgctatccagcagacgaaactcaatgtttttcagtaccagcgtcaggccgttttccagtgcggattgctcggcgtcaacgcctttggctgcgggaagattacccagcgcattgagatctaaagaagagatcggcgtcagaatgccgcctgcactaccgctgcacacggtgcgggcgcggataatttgcggattcagattggtcagactaaccggcagtggttccagttcgtcagatttaacttccgccagcggcgcatcgcagtgggggaattcatcgcgcagccattggcttaaacgctggtgcgcttcctgttcgtcggccccggaaatcagtaactggcagttatcgcccgccagcgtatcggtgccaatcagcgcaagggcgcttttggcgttgcccttgcggtcagtgcgcaggttatgccactcaatttgactactaaaagtattacacagcgtttcaacgtggcttgccggacgcgcatgtacgccgttaggtagctcacaaataaattccacaatcagggccattgcctctctcccggtacggttttctgtttacaggataagagcgcacggcaacggcctgccatgtgacaaatctgccaaaagctggacaaatgtaatgtaaccgtcaatttgcgacgcgtctcacaagacgctgttttgcggcatgcttccggtttatcgcaagttatgaggcggatcgcatttttgtactgatattacaaaagtccagtaaatggcctttttatccactgtttgctccgcctgcgattgcctattgtttcctccatcaaaaatatggacatgggctttcgcaagcccgggagcagcttatgaatgagttggtgcagatcctgaaaaatacccgtcagcatttaatgacgggcgttagtcacatgattcccttcgtggtaagcggcggtattttgctggcggtttccgtcatgttgtatggcaaaggcgcagtgccggatgccgtagccgatccaaatctgaaaaaactgtttgatatcggcgttgcgggcttgacgctgatggtgcctttcctcgcagcgtacatcggttattccattgcagagcgttctgcgctggctccgtgcgctatcggtgcctgggttggtaacagctttggtgcgggcttctttggtgcactgatcgccgggattatcggcggcatcgtggtgcattacctgaagaaaattccggtgcataaagttctgcgcagcgtgatgcctatcttcattattcctatcgtcggcacactgattaccgcaggcatcatgatgtggggcttgggcgagcctgtaggggcgttgaccaacagcctgactcagtggcttcaggggatgcagcagggcagcattgttatgctggcggtgatcatgggtctgatgctggcgttcgatatgggcggtccggttaacaaagtggcctatgccttcatgctgatttgcgttgctcagggtgtttataccgtggtggccatcgctgccgtgggtatttgtatcccgccgctggggatggggctggcgacgctgattggtcgtaaaaatttctccgcagaagagcgcgaaaccggcaaagcggcactggtgatgggctgtgttggcgttactgaaggggcgattcctttcgccgctgccgatccgctgcgtgtcattccttccatcatggtcggtagtgtttgtggtgcagtaactgcggcgctggtcggtgcgcagtgctatgcaggctggggtggtctgattgtgctgccggtggttgaaggcaagctgggttatatcgcagcagtggctgtcggagcagtggtgacggctgtttgtgtgaacgtgctgaaaagtctggcgcgtaaaaatgggtctagcactgatgaaaaagaagacgacctggatttggattttgaaattaattaattgaggaacgagccatgacgaaaattattgcagtaaccgcatgtcctagtggtgttgcccatacctatatggcagcagaggcgctggaaagtgccgcgaaagcgaaaggctgggaagtgaaagtagaaacccaggggagtattggtctggaaaatgaactgactgcggaagatgtggcgagcgctgatatggtgattctgaccaaagatatcggcatcaagtttgaagagcgttttgctggcaagaccatcgtgcgcgtcaacatcagcgatgcagtaaaacgtgctgacgccattatgagcaaaattgaagctcacctggcgcaaaccgcttaagttcttctcccgctcgcaagggcgggttcgctttcccacaggagttcctcatgacgaatcgtatctctcgcctcaaaactgcactgtttgccaatacccgtgaaatcagcctggagcgggcgctgctttataccgccagccatcggcaaaccgaaggcgaaccggtgatattgcgccgggcgaaagcaacagcgtatatccttgaacatgttgaaattagcattcgtgatgaagaactgattgccggtaaccgcaccgtaaaaccgcgcgccgggattatgagcccggaaatggacccttactggctgctgaaagagctggatcaattcccgacgcgtccgcaggaccgctttgctatcagcgaagaagataaacgtatctaccgtgaagagttgttcccgtactgggaaaaacgtagcatgaaagatttcatcaacgggcagatgacagatgaagtaaaagccgcgaccaacacgcagattttcagcatcaaccagacggataaaggccaggggcacattattattgattacccacgcctgttgaatcacgggctgggtgagctggtggcacagatgcagcaacattgtcagcaacagccggagaatcacttttatcaggccgcgttgttactgctggaagccagccagaaacacattttgcgttacgccgaactggcggaaacgatggcggcaaactgcacagatgcccagcgtcgcgaagagctgctgactattgcagagatctcccgccataacgcgcaacataagccgcagacgttctggcaggcgtgccagttattctggtacatgaacatcattctgcaatacgaatccaacgccagtagcctaagcttggggcgcttcgaccagtatatgttgccgttctatcagacaagtttaacccagggcgaagatgcggcgttcctgaaagaactgctcgaatctttatgggtgaaatgcaacgacatcgtgctgttgcgctccaccagtagcgcgcgttatttcgccggtttcccgaccggctataccgcactgctcggcgggttaaccgagaacggacgtagcgcggtgaacgtgcttagcttcctttgccttgacgcctatcaaagcgtgcaattaccgcaaccgaacctcggcgtgcgcactaacgccttgatcgacacgccgttcctgatgaaaaccgccgaaaccattcgcttcggtaccggtattccgcaaatctttaacgatgaagtggtggtgccagcgttcctcaaccgtggcgttagcctggaagatgcgcgcgactattccgtagtgggctgtgtggaattatctattcccggcagaacctacggcttgcatgacatcgcgatgtttaatctgctgaaagtgatggaaatctgcctgcatgaaaatgaaggcaatgctgcgctgacttatgaaggtttactggagcagatccgcgccaagatcagccactacatcaccctgatggttgagggcagcaatatttgtgatatcggccatcgcgactgggcacctgtaccgctgctcagtagctttatcagcgattgtctggaaaaaggccgcgatattaccgatggcggcgcgcgttataacttctccggcgtacaggggatcggtatcgccaacctgagcgattctctccatgcgttgaaagggatggtttttgagcaacagcgtttaagttttgacgaattgctgagcgtattaaaagccaacttcgcaacgccagaaggcgaaaaagtccgcgctcgcttaattaaccgcttcgagaaatacggtaacgatatcgacgaggtggataacatcagcgccgaactgttgcgccactactgcaaagaagtggaaaaataccagaacccgcgcggcggctacttcacgccgggaagctataccgtttctgctcacgtcccgttgggaagcgtggttggcgcgacgccagacggtcgttttgccggagaacagctggcagacggcggcttgagtcccatgctgggccaggacgcacaagggccaacagcggtactgaagagtgtcagtaagctcgataacacgctgctgtctaacggtacgttgctgaacgtgaaattcactccggcgaccctggaaggtgaagcaggattacgcaaactggccgacttcttacgggcgtttacccagcttaagttacaacatattcagtttaacgtggtgaacgccgacacgttgcgggaagcgcaacagcgcccacaagattatgccgggctggtggtgcgcgttgccggatacagcgccttctttgtcgaactgagcaaggagatccaggatgacatcatccgccggacagcgcatcagctgtaattaaactgtcgaaggagatccaggatgacaagttccgccggacagcgcatcagctgtaacgttgtggaaacgcgccgcgatgatgtggcgcgcattttcaacattcagcgttatagtctgaatgacggcgagggcattcgtacggtggtcttttttaaaggctgtccgcatctttgcccgtggtgtgctaatccggagagcatctccggcaaaatccagacggtacgcagagaggcgaaatgtctgcactgtgcgaaatgtttgcgtgatgcggatgaatgcccctccggggcgtttgaacggattggtcgcgatatcagccttgacgctctggaacgggaagtgatgaaagatgacattttctttcgcacgtccggcggcggcgtcacgctttctggcggcgaagtgttaatgcaggcggagtttgctacccgttttttacagcgactgcggctgtggggtgtgagttgcgccattgaaactgccggagacgcaccagccagcaagctattaccgctggcgaaattgtgcgatgaagtgttgttcgatttaaaaattatggacgcgactcaggcgcgggatgtggtgaagatgaacctgccacgcgtgctggagaatctgcgtttgctggtgagtgagggcgtcaacgtgatcccgcgtttaccgctgatccctggtttcacgctcagccgggagaatatgcagcaggcgctggatgtactgatcccgctgaatatcaggcagatccatctgttaccgtttcatcagtacggcgaaccgaaataccgcctgctggggaaaacatggagcatgaaagaggtgcctgcgccgagcagtgctgatgtggcaacgatgcgcgaaatggcagaacgggccggacttcaggttaccgtgggaggttaaaatggcatacctggtggcagtaaccgcctgcgtaagcggcgtggcgcatacttatatggcggcggaacggctggaaaagttgtgcctgttagagaagtggggagtcagcattgaaactcagggcgcgctgggaacggagaatcgtttagcggatgaggatatccgccgggcggatgttgctctgttgattacggatatcgagcttgccggtgccgagcgatttgaacattgccgctatgtgcaatgcagcatctacgcattcctgcgtgagccgcagcgggtaatgagcgcggtgcgcaaagtgctttctgcgccgcagcaaacccatcttattctggagtaattattctggagtagtcggtttttctgtcagttggctgtggtactgccggcgatattcgctcgggctgcgttcggtgtttttacgaaacagacggcagaagtagttgctgtcgacaaagccgcaggcgtgcgccacttcttttaccttcaggtcatagcctttcaataacgtcttagcgtgctccagtcgcgtgtgattcaggtattcgttaaaaccaatggcccccgttttttgaaacaggtggctgaggtaatttgggctaatataaaacgcctgtgcaacagattcgcgggtaagcgcggaggcatagcgttcgtcgatataatcgcgaatagcttcaaatagtgcctggctgcgactggcggtctggatttggctgccaagcaaatcgcggcagtggctaagcaggctggcgacgataagccttgccgtttgctgctcctgcggctgcatttgcatttcattgagcgtttgtagcagaaaagaacctatgcgtgggccgcgtcgggcgacgtgttgcttcgccagattttgatattgtttgccatcccattgcacgacgctgaagccgagttgctgtttgccaaacagcacgctaaaggtagtagcgggggcttgccattgtggaaaattccagccaccagcaggaacgtacagcacatcgccgggaactaacgttgctccagcgccggtatcaacaaactcaccttccagcacaatttccagccgtggaaaatcgacctgatacgcaagatcgggcaccgggccgttactgctggcaaagtaaatctggcgcagggacagcgggccgttgatcaggcgggagagcagatagctgacgtcgtgatacatgttattcccttaggtatgtagacgggaaaacagtaactggcattattaaaaaaggccacctgaaaagtgtggcctgaggggagttcgatgtaaacattgcggcagttgtattgccggatgtggcgtaaacgccttatccagcctaccgccgcgatctgtaggccggataagacgcgtcaagcgtcgcatccggcaaatagcgcctggctgataattactgattacccacctgatcgccatagggcagtgtgtcgtaatcgatcagtgcgtttttcttatacgggttaccaatccagcgggtagtttctttgaactgcggattcaccacactacgggttggatcgtaaccgtcgtaagataagcccgccaaatcactccaggtgtggatcagttccgccaggctgtatttacgatcaacatcctggctgaaatcacggggatgagtcgcttgccatttttcactcgtccacagcaggaacggaatggtgtacatatgacgcgtcgggttgtcctcattacgcccctgagttttgtgcggcggcgtgtcgtaaacctcttcaccgtggtcagagaaataaaccaggaaaccgttcgggtttgctgctttaaagtctttaatcaggctggcaaccacatgatcgttatacaggttagcgttgtcataatcgttataactctccagctcttccgcgtttaatcccggcggaacatgatcggtattgccatcaaacttgccctgattttccgggtagcggtatttgtatttgatatgcgtacccagcagatgaacaatgatcagtttcttcggcgcagggtcattcagcacttcctggaacggcttcagcacgttggtgtcgtattcacgcgcactctgcgtacgttgctggttcatgtagtactgcttgtcggtctggcggctaaataccgtcagcatggtattgcgggcggtcatcgtctgctggttggtgatccagaaggttttataacccgcctgtttcatcatgttcatcaggctcggctgcgtcagatacagatccgggttcttttcattggcaaaggtcagcgcctgttgcaggatttcaatggtgtacggacgagacgtaactacgttattaaacacggtcagattcggatcggttttatgcagcgcatccagctccggcgtggtttcacgcggataaccgtacagactcatgcgtccgcgctgggtgctctcgccaatcaccagcactaaagtgcgcggttcgttaccgctttcatctttgaaattagccagtggcggcaaggcattattttcattcagtaactttgttaggctgtttagttgctgacgatactgataatagccggtcaggaattgccacggtgcggcaggctccatacggctggccaggttatccaacgttttctcaaacggcttgtttttgataaacgtattcatggcgatcggatgcagaatcaagccataaagcagggcaaaagagacaacataacgccacggctttggaatatagaccgggcgcaggcgtgtccacagcagaactgccaccgccgtataggccagcgcgataagcacaattttcaggctgaaatactggcttaaatactcgctggcttcgttggtgttggtttcgaacatcacaaacagaacgctctggctgaactcctgaccgtagatgacgtagtagcacagcgccgccagagaggccgcccatagcaccacgccgattactgcggcaataattttaatccgcttcggaaagaggaataccgggatcaaccacaggctactgaataacaggctgtcgcgaatgccgttagtgccactataaccactgatgtaaataatggcctgtagcagagtagagaaaaaccaaaagtagagcagtgcccaacccagggctttccagctaaaaagaggtttagcctggacttctgtggaatgcatagtaagaacctgtcttgaaaaaatatcgccgaatgtaacgacaattccttaaggatatctgaaggtatattcagaatttgaataaaatgcagacagaaatatattgaaaacgagggtgttagaacagaagtatttcagaaaaccctcgcgcaaaagcacgagggtttgcagaagaggaagattagccggtattacgcatacctgccgcaatcccggcaatagtgaccattaacgcttgttcgacgcgaggatccggttcctggccttctttttctgcctggcgggagcggtgcagcaactcggcctgcaatacgttcagcgggtcggtgtaaatattccgtagctgaatagactctgcaatccacggcagatcggccatcagatgggaatcgttggcaatcgccagcaccactttgatgtcttcttcttgcaggttgcgtaactctttacctaacggccacagtgctttgtctaccaggcgttggtcatagtattccgccagccacaggtctgctttggcgaagaccatctccagcatgccgagacgcgtgctgaagaatggccaatcgcggcacatagcctccagctcgctctgtttgccgtcttcgaccactttttgcagcgccgtacctgcacccagccaggcggggagcatcagacggttttgcgtccaggcgaagatccacggaatggcgcgtagactctcgacgccgccggttgggcgacgtttcgccggacgactacccaacggcagtttgcccagttcttgttccggcgtagcggagcggaagtaaggcacaaaatctttgttttcacgtacgtagccgcggtagacatcgcaggagatgacactcagttcatccataatgcgacgccagctctctttcggctccggcggtggcagcaggttggcttccagaatcgccccggtataaaggctcaggctgctgacggtgatttctggcagaccatatttaaagcggatcatctcgccctgttcggttacgcgcaggccgcctttcaggcttcctggcggttgactcagcagcgccgcatgagcaggtgcgccgccgcgaccaatggaaccgccgcgaccgtggaacaacgtcagctcaatacccgctttttcgcaggttttgattaatgcatcctgtgcctgatattgcgcccaggaagctgccatcactcccgcatcttttgcactgtcggaatagccaatcatcaccatctgtttgccctgaatcaggccacgataccagtcaatattgagcagctgggtcatgacatcgttggcgttgttcagatcatcgagggtttcaaacagcggagcaaccggcatcgcaaacccgatacccgcttctttcagcagcaggtggacagccagtacgtcggacggcgttttcgccatgctgatcacgtaggcggcaatggagccttgcggtgcttcggcaatcacctggcaggtatcgagcacttcgcgcgtttcggcgcttggttgccagttgcgcggcagaagcggacgtttggagttcagttcgcggatcaggaacgcctgtttgtcggcctcactccagctttcgtagtcgccgataccgaggtagcgggtcagctcgcccagcgcttcggtatgacgcgtgctctcctgacggatatcaatacggaccagcggtacgccgaaacatttcacgcggcgcagggtgtcgagcagatcgccgttggcgataatacccatgccacacgcctgaagactctggtagcaagcgtagagcggttcccacagttcttcgttttgtgtcagcaggccttctggttttggcagttcttcgcctttcaggcgcgcttccagccatgcctgtgtcgccatcaggcgagaacgcaggtttttcatcagatagcgatacggttctgcggcaccttcttcgccaaccagcgccagcagttcaggggtcgcttcaaccatgctcagttcagaaaccagcacctgaatatctttcaggaacaaatcggtggctttccagcggctgagtagcaggacgtggcgggtgatatcggcagtgacgttcgggttgccgtcgcggtcgccgcccatccagctagtaaaacggaccggaacaaattcgacgggcagtttgtagccgaggttctcttccagttgttcgttcagttcgcgcaggtaatttggtacgccttgccacaggctgttttccactacggcaaagccccatttggcttcatctaccgggcttggacgcagcttacggatttcatcggtatgccaactctgggcgatcaactggcgcaggcgacgcatcagctggttgtgttcgtagtcagcgatatctttgttatcgagctgttttaaacaggcgttcacttccaccattttgtggatcagtgtacgacgggtaatttcggttgggtgagccgtgaggaccagttccaggctcaggctttccactgcttttttgatggtgtcttcgctcagttccggctggtttttcagtttacgcagggtgcgggcgatcacttccgggttgctggcagcttcgcctttcgggctaatgctgtggtattgctcggcggtgttggccaggttcaggaactgactaaacgcacgcgcaacgggcagcagctcgtcgttgctcaaattttgtaaggtggtgagcaactcctggcggttagcatcattgccagcgcgactagatttgctcaacttacggatagtttctacgcgttcaagaatgtgttctcccaacgcatccttgatggtttctcccagcactttgccgagcatactgacattactacgcaatgcggaatattgttcgttcatattaccccagacaccccatcttatcgtttgatagccctgtatccttcacgtcgcattggcgcgaatatgctcgggctttgcttttcgtcgtcttttataaagccacgtaaaagcggtgacgtcaaatgctgcgaaatcgcttcagcaaacgaataaatagcaggaatttacgtcattaaattcacgacgctttaaataagcgtaacttatggaaatgttaaaaaatcgccccaagtaacaccaaaggtgtaggtcggataagatgcgcaagtatcgcatccgacattattgcggcactggagtttggcaacagtgccggatgcggcgcgagcgccttatccggcctacagttgggcatcgtttgagtcactgtcggtcggataagatgcgcaagtatcgcatccgacattattgcggcactggagtttggcaacagtgccggatgcggcgcgagcgccttatccggcctacggttgggcatcgtttgagtcactgtaggtcggataagatgcgcaagcatcgcatccgacattattgcggcactggagtttggcaacagcgccggatgcggcgcgagcgccttatccggcctacgttttaatgccagcaaaaatggtgaattacctgggttatcagttcgcgggtgggcttgataaaccgtgtttccagatattcatcaggttgatgagcctgattaatactgccaggccccaacaccagcgtcgggcataacgtttgaataaacggcgcttcggtacagtagttcaccacttcggtttttgctccgagcaatttctcaaccacttcaaccagttgatgattcggtgggcattcatagccagggatcggcggatgcagctcgtcgaccgtcagacgacccggccagcgttcgctcaccggagccaatgcatcgttgagcaaaccattaagttcattgagtgtcatgccaggcagcggacgaatatccatatgcaactcacagcaagcgcaaatacggttagaagcgtcgccaccgtgaatatgcccgaggttgagcgtagggtatggcacggtaaacgcttcgtagtgataacgttctttcaggttatcgcgcaattgcaaaatatgcccgatggcgtcgtgcattagttcgatagcgttaactccgcgtgctggatcgctggagtgcccgctctggccctgaatacggatggcgttagagatatgacctttatgtgcgcgtaccggttgtagactcgtcggttcgccaatgatggcgcaatccgggcgcagggcggtagtttcggcaaaataacgcgctccggccatactggtttcttcatcagcagtcgccagaatgtagagcggttttttcagtttcgtgacgtcgacatcgcgtagcgcatcaaggataaacgcaaaaaagcctttcatgtcggcggtgcctaagccgtaaagcttgccgtcatgctccgtcagtgtaaacggatcgcgcgtccagcgaccgtcatcaaatggcaccgtatcggtatgccccgccagcaacaagccgccagccccctgtccgatacttgccagcatattgaatttgttgcgagttcctggaacaggctgcacttccacattgaagcccaaatctttaaaccagtccgccagcagagtgattaaatctgcattgctttgatcgagtgcctcttccgtggcgcttatactaggtgtggcaatcagagcgcggtaaatctcgataaatggcggtaatttgtttttcattgttgacacacctctggtcatgatagtatcaatattcatgcagtatttatgaataaaaatacactaacgttgagcgtaataaaacccaccagccgtaaggtgaatgttttacgtttaacctggcaaccagacataagaaggtgaatagccccgatgttgaatacgctgattgtgggtgccagcggctacgctggcgcagagctagtgacctatgtaaatcgccatccgcatatgaacataaccgctttgactgttagtgcgcaaagcaatgatgcgggaaagttaatctccgatttgcatccgcagctaaaaggcatcgttgatctgccgttgcagccgatgagcgatatcagcgagtttagcccaggggtggacgtagtgtttctcgccaccgcccatgaagttagccacgatttagcgccgcagtttcttgaagcgggctgcgtggtgttcgacctttccggcgcgtttcgtgttaacgacgccaccttctatgaaaaatattacggctttacccatcaatacccggaactgttggaacaggcagcctacggtctggcggagtggtgcggtaataaattaaaagaagcgaatttgattgcggtgccgggctgttatccgacggcggcacagctggcgctgaaaccgttgattgatgccgatcttcttgacctcaatcagtggccggtgatcaacgccaccagcggcgtgagcggtgcagggcgtaaagcggccattagtaacagcttttgtgaagttagcctgcaaccgtatggcgtctttactcatcgccatcaaccagagatcgccacacacctcggtgctgacgttatcttcaccccacatctgggcaatttcccgcgcggcattctcgaaaccattacctgccgcctgaaaagcggtgtgacccaggcgcaagtcgcgcaagtgttacagcaggcgtatgcccataaaccgctggtgcggctgtatgacaaaggcgttccggcgctgaaaaatgtcgttgggctgccattttgcgatatcgggtttgccgttcagggcgagcatctgattattgtggcgaccgaagacaacttactgaaaggcgcggcggcacaagcggtacagtgcgccaatattcgtttcggctatgcggaaacgcagtctcttatttaagggtgcaatgatgaatccattaattatcaaactgggcggcgtactgctggatagtgaagaggcgctggaacgtctgtttagcgcactggtgaattatcgtgagagtcatcagcgtccgctggtgattgtgcacggcggcggttgcgtggtggatgagctgatgaaagggctgaatctgccggtgaaaaagaaaaacggcctgcgggtgacgcctgctgatcagatagacattatcaccggagcactggcgggaacggcaaataaaaccctgttggcatgggcgaagaaacatcagattgcggccgtaggtttgtttctcggtgacggcgacagcgtcaaagtgacccagcttgatgaagagttaggtcatgttggactggcgcagccaggtagccctaagcttatcaactccttgctggagaacggttatctgccggtggtcagctccattggcgtaacagacgaagggcaactgatgaacgtcaatgccgaccaggcggcaacggcgctggcggcaacgctgggcgcggatctgattttgctctccgacgtcagcggcattctcgacggcaaagggcaacgcattgccgaaatgaccgccgcgaaagcagaacaactgattgagcagggcattattactgacggcatgatagtgaaagtgaacgcggcgctggatgcggcccgcacgctgggccgtccggtagatatcgcctcctggcgtcatgcggagcagcttccggcactgtttaacggtatgccgatgggtacgcggattttagcttaagttttgttggccggaggcgcagctttccggcattgaatttcaaaataaggaaacagagttatggcactttggggcgggcgttttacccaggcagcagatcaacggttcaaacaattcaacgacagtctgcgctttgattaccgtctggcggagcaggatattgttggctctgtggcctggtccaaagccctggtcacggtaggcgtgttaaccgcagaagagcaggcgcaactggaagaggcgctgaacgtgttgctggaagatgttcgcgccaggccacaacaaatccttgaaagcgacgccgaagatatccatagctgggtggaaggcaaactgatcgacaaagtgggccagttaggcaaaaagctgcataccgggcgtagccgtaatgatcaggtagcgactgacctgaaactgtggtgcaaagataccgttagcgagttactgacggctaaccggcagctgcaaagcgcgctggtggaaaccgcacaaaacaatcaggacgcggtaatgccaggttacactcacctgcaacgcgcccagccggtgacgttcgcgcactggtgcctggcctatgttgagatgctggcgcgtgatgaaagccgtttgcaggatgcgcttaagcgtctggatgtcagcccgctaggctgtggcgcgctggcgggaacggcctatgaaatcgaccgtgaacagttagcaggctggctgggctttgctagcgcgacccgtaacagtctcgacagcgtttctgaccgtgaccatgtgttggaactgctttctgctgccgctatcggcatggtgcatctgagccgttttgctgaagatctgattttctttaacaccggcgaagcggggtttgtggagctttctgaccgcgtgacttccggtagtagtttaatgccgcagaagaaaaacccggatgcgctggagctgattcgcggtaaatgcggccgggtgcagggggcgttaaccggcatgatgatgacgctgaaaggtttgccgctggcttacaacaaagatatgcaggaagacaaagaaggtctgttcgacgcgctcgatacctggctggactgcctgcatatggcggcgctggtgctggacggcattcaggtgaaacgtccacgttgccaggaagcggctcagcagggttacgccaacgccaccgaactggcggattatctggtggcgaaaggcgtaccgttccgcgaggcgcaccatattgttggtgaagcggtggtggaagccattcgtcagggcaaaccgctggaagatctgccgctcagtgagttgcagaaattcagtcaggtgattgacgaagatgtctatccgattctgagcctgcaaagctgcctcgacaagcgtgcggcaaaaggcggcgtcagtccgcagcaggtggcgcaggcgattgcttttgcgcaggctcggttagggtaagaacatttatatgtataaatttgagcctggcttatcgccgggcttttttatggcaaaaaaaagcggatcctggagatccgcaaaagttcacgttggctttagttattcgagttgagaaactctcgaaacgggcagtgacttcaagggttaaaagaggtgccgctccgtttctgtgagcaattatcagtcagaatgcttgatagggataatcgttcattgctattctacctatcgccatgaactatcgtggcgatggaggatggataatgaatattcgtgatcttgagtacctggtggcattggctgaacaccgccattttcggcgtgcggcagattcctgccacgttagccagccgacgcttagcgggcaaattcgtaagctggaagatgagctgggcgtgatgttgctggagcggaccagccgtaaagtgttgttcacccaggcgggaatgctgctggtggatcaggcgcgtaccgtgctgcgtgaggtgaaagtccttaaagagatggcaagccagcagggcgagacgatgtccggaccgctgcacattggtttgattcccacagttggaccgtacctgctaccgcatattatccctatgctgcaccagacctttccaaagctggaaatgtatctgcatgaagcacagacccaccagttactggcgcaactggacagcggcaaactcgattgcgtgatcctcgcgctggtgaaagagagcgaagcattcattgaagtgccgttgtttgatgagccaatgttgctggctatctatgaagatcacccgtgggcgaaccgcgaatgcgtaccgatggccgatctggcaggggaaaaactgctgatgctggaagatggtcactgtttgcgcgatcaggcaatgggtttctgttttgaagccggggcggatgaagatacacacttccgcgcgaccagcctggaaactctgcgcaacatggtggcggcaggtagcgggatcactttactgccagcgctggctgtgccgccggagcgcaaacgcgatggggttgtttatctgccgtgcattaagccggaaccacgccgcactattggcctggtttatcgtcctggcagtccgctgcgcagccgctatgagcagctggcagaggccatccgcgcaagaatggatggccatttcgataaagttttaaaacaggcggtttaaaccgtttaacgcagctacccgataggcttccgccatcgtcgggtagttaaaggtggtgttgacgaagtactcaatagtgttgccgccacctttctgttccataatcgcctgaccgatatgaataatttcggcagcgcgctcgccaaagcagtgaatacccagaatctcttttgtttcccgatggaacaaaattttcagcgtgcccacgttcatgccgacgatttgtgcgcgtgccagatgtttaaactgggcgcggcccacttcatatggcactttcattgcggtcagctgctgttcggttttgcccacagagctgatttccgggatggtgtaaataccggtagggatatcttcaatcagatgtgcggtggcttcgccttttaccagcgcctgcgcggcaatgcgcccctggtcataggccgcgctcgccaggctcggataaccaatcacgtcgcccaccgcgtaaacgtgtggctgtgcggtctgatacatgctgttgaccttcagctgtccgcggctgtcagtttctagcccaatgttctgtaacgccaggctatcggtattaccggtgcgaccgttggcatagagcaggcagtcagctttcagttttttaccgctcttcagatgcatgatcacaccatcgtcacagccttcgatcttctcgtactcttcgttgtgacgaatcactacgccactgttccagaagtgataggagagagaatcactcatctcttgatcgagaaatgccagcaggcgatcgcgggtgttgatcagatccacttttacatccataccgcggaagatgctcgcatattcacagccgatcactccagcaccatagataagtacatggcgcggttcgtggtgcatgctgagaatactgtcgctgtcgtaaatgcgtggatgggtgaaatcaacatctgttggatgatatggacgagagccgcaggcaataacaaatttttcagcggttagtgtttcaacgctgccgtccgggcaatccagcgccaacgtatgctcgtcaacaaagcgagcgtttccctgcaatatttcacagtgattacgttcgtaaaatccctgacgcatgcgcgtttgttgattaatcacgttatcggcatggttaaggatatcggcaaaagaagagcggagcagtcgggaatggtcgctgtaaagtgggttttgattgaattctataatgcggctgacggcgtgacggagagctttgctcgggatggtgccccagtgggtgcaaccgccgccaacattttgataacgctcgataactgcgacgcgcgcaccttgcttaaccaggcccattgcagcgccttcgccgccggggccggaacctattactatggcatcgtaatcgtaggaatgtggcatggtagggcttacctgttcttatacataaaagcaacagaatggtaacattttatcgcgggtaagccaattgatccccgtcatttatctggctatatcctgagcggcctttgctttgtctgtttcttacttttgccctgacgttttattggatttttatcgacgatactctccgtttaagcggcaggtttccgctgtacgtaaaagaaccggccaaagaattgcagtaaatatgttttattgcgttaccgttcattcacaatactggagcaatccagtatgttcattctctggtatagtgccagcagtacttttggcaaggatagtgacatcgtgatgggcgtaagagcgcaacaaaaagaaaaaacccgccgtagcctggtggaagccgcatttagccaattaagtgctgaacgcagcttcgccagcctgagtttgcgtgaagtggcgcgtgaagcgggcattgctcccacctctttttatcggcatttccgcgacgtagacgaactgggtctgaccatggttgatgagagcggtttaatgctacgccaactcatgcgccaggcgcgtcagcgtatcgccaaaggcgggagtgtgatccgcaccagcgtctccacatttatggagttcatcggtaataatcctaacgccttccggttattattgcgggaacgctccggcacctccgctgcgtttcgtgccgccgttgcgcgtgaaattcagcacttcattgcggaacttgcggactatctggaactcgaaaaccatatgccgcgtgcgtttactgaagcgcaagccgaagcaatggtgacaattgtcttcagtgcgggtgccgaggcgttggacgtcggcgtcgaacaacgtcggcaattagaagagcgactggtactgcaactgcgaatgattagcaaaggggcttattactggtatcgccgtgaacaagagaaaaccgcaattattccgggaaatgtgaaggacgagtaatgaaacaagcaaatcaagatagaggtacgctgctgctggcgttagttgctggcttaagcattaatggtactttcgcagcgctgtttagctccattgtgccattttctgtattcccgattatttccctggtgctgacggtttactgcctgcatcaacgttatcttaatcgcactatgccggtaggcttgccgggtctggcagctgcctgttttattctcggcgtactgctgtacagcacggtagttcgtgcggaatatccggatatcggctctaacttcttcccggcagtactctccgtcattatggtgttctggattggcgcgaagatgcgtaaccgtaagcaggaagttgctgagtaatcggtattatgccggatgctggcgcatccggcatgggttttacttcgcggtcagtaatacgccgcactccatatggtgcgtgtaggggaactgatcaaacagagccagacgttcgaccttgtgcgtctggcttaatgtttccagattcttgcataacgtttccgggttacaggagatgtacaaaatacgcggatacgcctgcaccattttctcggtttcactgtccagaccgctgcgcggagggtcgacaaaaatggtttcgcactgataactctttaagtcgatcccttgcaggcggttaaactcgcgcacaccattcatcgcctgagtaaattcttctgccgccatacgaataatttgtacgttatcaatatggttagctgcgatgttgtattgcgcagcagcaacgctcggcttagcgatttcggtggctaatacccgatcaaaattacgcgccagcgctaaactaaagttaccgttgccgcagtacagctccagtaaatcgcctttactgcctttggttacgtccagcgcccattccagcatctgaatattcatcgccgcgttcggctgggtaaagctgttttctacctgacggtagatcatctctttccctgcgaccggcagacgttcatcgatgtaatcctgatccagctcgattttggttttcgttgcccgaccaatcagatgcacattcagattctgcgcgcgcagtgcatcgcgcagggcctccgcttcctgacgccactcatcatccagcttcttatggtatagcagggaaaccaccgcctgattactcagtgtagtgaggtaatcaatctggaacaacttgtggcgcagaacgggattattacgcacacccgcaatcatcgccgtcatcaactggttgataagttcactggcggcggggaagctatccacgcggatgcggcttttggtttgttgatcgaaaatgatgtgatacaggtcatcgccatcgtgccagatgcggaactccgcgcgcatccggtaatgactgaccgggctgcgaaacacttccggaaccaggtcagaaaacggtgccatcatactttgcaaacgtaccactttttcggctaactgcgcttcatactgttctgttggaaggtgttcgggggtcatgatgtatcctgaaaaattaaagtacgcggcgattgtagggattgctcatcagatgtccagatcttgatgaattcctatttgtgagctacgtctggacagtaacttgttacaacctgtagcatccacttgccggtcctgtgagttaatagggaatccagtgcgaatctggagctgacgcgcagcggtaaggaaaggtgcgatgattgcgttatgcggacactgccattcggtgggaagtcatcatctcttagtatcttagatacccctccaagcccgaagacctgccggccaacgtcgcatctggttctcatcatcgcgtaatattgatgaaacctgcggcatccttcttctattgtggatgctttacaatgattaaaaaagctagcctgctgacggcgtgttccgtcacggcattttccgcttgggcacaggataccagcccggatactctcgtcgttactgctaaccgttttgaacagccgcgcagcactgtgcttgcaccaaccaccgttgtgacccgtcaggatatcgaccgctggcagagcaccagcgtcaatgatgtgctgcgccgtcttccgggcgtcgatatcacccaaaacggcggtagtggtcagctcagttctatttttattcgcggtacaaatgccagtcatgtgttggtgttaattgatggcgtacgcctgaatctggcgggggtgagtggttctgccgaccttagccagttccctattgcgcttgtccagcgtgttgaatatatccgtgggccgcgctccgctgtttatggttccgatgcaataggcggggtggtgaatatcatcacgacgcgcgatgaacccggaacggaaattagtgcagggtggggaagcaatagttatcagaactatgatgtctctacgcagcaacaactgggggataagacacgggtaacgctgttgggcgattatgcccatactcatggttatgatgttgttgcctatggtaataccggaacgcaagcgcagacagataacgatggttttttaagtaaaacgctttatggcgcgctggagcataactttactgatgcctggagcggctttgtgcgcggctatggctatgataaccgtaccaattatgacgcgtattattctcccggtagtccgttgctcgatacccgtaaactctatagccaaagttgggacgccgggctgcgctataacggcgaactgattaaaagtcaactcattaccagctatagccatagcaaagattacaactacgatccccattatggtcgttatgatagcagcgcgacgctcgatgagatgaagcaatacaccgtccagtgggcaaacaatgtcatcgttggtcacggtagtattggtgcgggtgtcgactggcagaaacagactacgacgccgggtacaggttatgttgaggatggatatgatcaacgtaataccggcatctatctgaccgggctgcaacaagtcggcgattttacctttgaaggcgcagcacgcagtgacgataacagtcagtttggtcgtcatggaacctggcaaaccagcgccggttgggaattcatcgaaggttatcgcttcattgcttcctacgggacatcttataaggcaccaaatctggggcaactgtatggcttctacggaaatccgaatctggacccggagaaaagcaaacagtgggaaggcgcgtttgaaggcttaaccgctggggtgaactggcgtatttccggatatcgtaacgatgtcagtgacttgatcgattatgatgatcacaccctgaaatattacaacgaagggaaagcgcggattaagggcgtcgaggcgaccgccaattttgataccggaccactgacgcatactgtgagttatgattatgtcgatgcgcgcaatgcgattaccgacacgccgttgttacgccgtgctaaacagcaggtgaaataccagctcgactggcagttgtatgacttcgactggggtattacttatcagtatttaggcactcgctatgataaggattacagttcttatccttatcaaaccgttaaaatgggcggtgtgagcttgtgggatcttgcggttgcgtatccggtcacctctcacctgacagttcgtggtaaaatagccaacctgttcgacaaagattatgagacagtctatggctaccaaactgcaggacgggaatacaccttgtctggcagctacaccttctgaaccacgtcccaccgtgctggtgtttgactccggcgtcggtgggttgagcgtctatgacgagatccggcatctcttaccggatctccattacatttatgctttcgataacgtcgctttcccgtatggcgaaaaaagcgaagcgtttattgttgagcgagtggtggcaattgtcaccgcggtgcaagaacgttatccccttgcgctggctgtggtcgcttgcaacactgccagtaccgttagtcttcctgcattacgcgaaaagttcgacttcccggttgttggtgtcgtgccggcgattaaacctgctgcacgtctgacggcaaatggcattgtcggattactggcaacccgcggaacagttaaacgttcttatactcatgagctgatcgcgcgtttcgctaatgaatgccagatagaaatgctgggcagcgcagagatggttgagttggctgaagcgaagctacatggcgaagatgtttctctggatgcactaaaacgtatcctacgcccgtggttaagaatgaaagagccgccagataccgttgtattgggttgcacccatttccctctactacaagaagaactgttacaagtgctgccagagggaacccggctggtggattctggcgcagcgattgctcgccgaacggcctggttgttagaacatgaagccccggatgcaaaatctgccgatgcgaatattgccttttgtatggcaatgacgccaggagctgaacaattattgcccgttttacagcgttacggcttcgaaacgctcgaaaaactggcagttttaggctgatttggttgaatgttgcgcggtcagaaaattattttaaatttcctcttgtcaggccggaataactccccataatgcgccaccactgacacggaacaacggcaaacacgccgccgggtcagcggggttctcctgagaactccggcagagaaagcaaaaataaatgcttgactctgtagcgggaaggcgtattatgcacaccccgcgccgctgagaaaaagcgaagcggcactgctctttaacaatttatcagacaatctgtgtgggcactcgaagatacggattcttaacgtcgcaagacgaaaaatgaataccaagtctcaagagtgaacacgtaattcattacgaagtttaattctttgagcgtcaaacttttaaattgaagagtttgatcatggctcagattgaacgctggcggcaggcctaacacatgcaagtcgaacggtaacaggaagaagcttgcttctttgctgacgagtggcggacgggtgagtaatgtctgggaaactgcctgatggagggggataactactggaaacggtagctaataccgcataacgtcgcaagaccaaagagggggaccttcgggcctcttgccatcggatgtgcccagatgggattagctagtaggtggggtaacggctcacctaggcgacgatccctagctggtctgagaggatgaccagccacactggaactgagacacggtccagactcctacgggaggcagcagtggggaatattgcacaatgggcgcaagcctgatgcagccatgccgcgtgtatgaagaaggccttcgggttgtaaagtactttcagcggggaggaagggagtaaagttaatacctttgctcattgacgttacccgcagaagaagcaccggctaactccgtgccagcagccgcggtaatacggagggtgcaagcgttaatcggaattactgggcgtaaagcgcacgcaggcggtttgttaagtcagatgtgaaatccccgggctcaacctgggaactgcatctgatactggcaagcttgagtctcgtagaggggggtagaattccaggtgtagcggtgaaatgcgtagagatctggaggaataccggtggcgaaggcggccccctggacgaagactgacgctcaggtgcgaaagcgtggggagcaaacaggattagataccctggtagtccacgccgtaaacgatgtcgacttggaggttgtgcccttgaggcgtggcttccggagctaacgcgttaagtcgaccgcctggggagtacggccgcaaggttaaaactcaaatgaattgacgggggcccgcacaagcggtggagcatgtggtttaattcgatgcaacgcgaagaaccttacctggtcttgacatccacggaagttttcagagatgagaatgtgccttcgggaaccgtgagacaggtgctgcatggctgtcgtcagctcgtgttgtgaaatgttgggttaagtcccgcaacgagcgcaacccttatcctttgttgccagcggtccggccgggaactcaaaggagactgccagtgataaactggaggaaggtggggatgacgtcaagtcatcatggcccttacgaccagggctacacacgtgctacaatggcgcatacaaagagaagcgacctcgcgagagcaagcggacctcataaagtgcgtcgtagtccggattggagtctgcaactcgactccatgaagtcggaatcgctagtaatcgtggatcagaatgccacggtgaatacgttcccgggccttgtacacaccgcccgtcacaccatgggagtgggttgcaaaagaagtaggtagcttaaccttcgggagggcgcttaccactttgtgattcatgactggggtgaagtcgtaacaaggtaaccgtaggggaacctgcggttggatcacctccttaccttaaagaagcgtactttgtagtgctcacacagattgtctgatagaaagtgaaaagcaaggcgtttacgcgttgggagtgaggctgaagagaataaggccgttcgctttctattaatgaaagctcaccctacacgaaaatatcacgcaacgcgtgataagcaattttcgtgtccccttcgtctagaggcccaggacaccgccctttcacggcggtaacaggggttcgaatcccctaggggacgccacttgctggtttgtgagtgaaagtcgccgaccttaatatctcaaaactcatcttcgggtgatgtttgagatatttgctctttaaaaatctggatcaagctgaaaattgaaacactgaacaacgagagttgttcgtgagtctctcaaattttcgcaacacgatgatgaatcgaaagaaacatcttcgggttgtgaggttaagcgactaagcgtacacggtggatgccctggcagtcagaggcgatgaaggacgtgctaatctgcgataagcgtcggtaaggtgatatgaaccgttataaccggcgatttccgaatggggaaacccagtgtgtttcgacacactatcattaactgaatccataggttaatgaggcgaaccgggggaactgaaacatctaagtaccccgaggaaaagaaatcaaccgagattcccccagtagcggcgagcgaacggggagcagcccagagcctgaatcagtgtgtgtgttagtggaagcgtctggaaaggcgcgcgatacagggtgacagccccgtacacaaaaatgcacatgctgtgagctcgatgagtagggcgggacacgtggtatcctgtctgaatatggggggaccatcctccaaggctaaatactcctgactgaccgatagtgaaccagtaccgtgagggaaaggcgaaaagaaccccggcgaggggagtgaaaaagaacctgaaaccgtgtacgtacaagcagtgggagcacgcttaggcgtgtgactgcgtaccttttgtataatgggtcagcgacttatattctgtagcaaggttaaccgaataggggagccgaagggaaaccgagtcttaactgggcgttaagttgcagggtatagacccgaaacccggtgatctagccatgggcaggttgaaggttgggtaacactaactggaggaccgaaccgactaatgttgaaaaattagcggatgacttgtggctgggggtgaaaggccaatcaaaccgggagatagctggttctccccgaaagctatttaggtagcgcctcgtgaattcatctccgggggtagagcactgtttcggcaagggggtcatcccgacttaccaacccgatgcaaactgcgaataccggagaatgttatcacgggagacacacggcgggtgctaacgtccgtcgtgaagagggaaacaacccagaccgccagctaaggtcccaaagtcatggttaagtgggaaacgatgtgggaaggcccagacagccaggatgttggcttagaagcagccatcatttaaagaaagcgtaatagctcactggtcgagtcggcctgcgcggaagatgtaacggggctaaaccatgcaccgaagctgcggcagcgacgcttatgcgttgttgggtaggggagcgttctgtaagcctgcgaaggtgtgctgtgaggcatgctggaggtatcagaagtgcgaatgctgacataagtaacgataaagcgggtgaaaagcccgctcgccggaagaccaagggttcctgtccaacgttaatcggggcagggtgagtcgacccctaaggcgaggccgaaaggcgtagtcgatgggaaacaggttaatattcctgtacttggtgttactgcgaaggggggacggagaaggctatgttggccgggcgacggttgtcccggtttaagcgtgtaggctggttttccaggcaaatccggaaaatcaaggctgaggcgtgatgacgaggcactacggtgctgaagcaacaaatgccctgcttccaggaaaagcctctaagcatcaggtaacatcaaatcgtaccccaaaccgacacaggtggtcaggtagagaataccaaggcgcttgagagaactcgggtgaaggaactaggcaaaatggtgccgtaacttcgggagaaggcacgctgatatgtaggtgaggtccctcgcggatggagctgaaatcagtcgaagataccagctggctgcaactgtttattaaaaacacagcactgtgcaaacacgaaagtggacgtatacggtgtgacgcctgcccggtgccggaaggttaattgatggggttagcgcaagcgaagctcttgatcgaagccccggtaaacggcggccgtaactataacggtcctaaggtagcgaaattccttgtcgggtaagttccgacctgcacgaatggcgtaatgatggccaggctgtctccacccgagactcagtgaaattgaactcgctgtgaagatgcagtgtacccgcggcaagacggaaagaccccgtgaacctttactatagcttgacactgaacattgagccttgatgtgtaggataggtgggaggctttgaagtgtggacgccagtctgcatggagccgaccttgaaataccaccctttaatgtttgatgttctaacgttgacccgtaatccgggttgcggacagtgtctggtgggtagtttgactggggcggtctcctcctaaagagtaacggaggagcacgaaggttggctaatcctggtcggacatcaggaggttagtgcaatggcataagccagcttgactgcgagcgtgacggcgcgagcaggtgcgaaagcaggtcatagtgatccggtggttctgaatggaagggccatcgctcaacggataaaaggtactccggggataacaggctgataccgcccaagagttcatatcgacggcggtgtttggcacctcgatgtcggctcatcacatcctggggctgaagtaggtcccaagggtatggctgttcgccatttaaagtggtacgcgagctgggtttagaacgtcgtgagacagttcggtccctatctgccgtgggcgctggagaactgaggggggctgctcctagtacgagaggaccggagtggacgcatcactggtgttcgggttgtcatgccaatggcactgcccggtagctaaatgcggaagagataagtgctgaaagcatctaagcacgaaacttgccccgagatgagttctccctgaccctttaagggtcctgaaggaacgttgaagacgacgacgttgataggccgggtgtgtaagcgcagcgatgcgttgagctaaccggtactaatgaaccgtgaggcttaaccttacaacgccgaagctgttttggcggatgagagaagattttcagcctgatacagattaaatcagaacgcagaagcggtctgataaaacagaatttgcctggcggcagtagcgcggtggtcccacctgaccccatgccgaactcagaagtgaaacgccgtagcgccgatggtagtgtggggtctccccatgcgagagtagggaactgccaggcatcaaataaaacgaaaggctcagtcgaaagactgggcctttcgttttatctgttgtttgtcggtgaacgctctcctgagtaggacaaatccgccgggagcggatttgaacgttgcgaagcaacggcccggagggtggcgggcaggacgcccgccataaactgccaggcatcaaattaagcagaaggccatcctgacggatggcctttttgcgtttctacaaactcttcctgtcgtcatatctacaagccatccccccacagatacggtaaactagcctcgtttttgcatcaggaaagcagctatgaaccactccttaaaaccctggaacacatttggcattgatcataatgctcagcacattgtatgtgccgaagacgaacaacaattactcaatgcctggcagtatgcaaccgcagaaggacaacccgttcttattctgggtgaaggaagtaatgtactttttctggaggactatcgcggcacggtgatcatcaaccggatcaaaggtatcgaaattcatgatgaacctgatgcgtggtatttacatgtaggagccggagaaaactggcatcgtctggtaaaatacactttgcaggaaggtatgcctggtctggaaaatctggcattaattcctggttgtgtcggcagtagtcctatccagaatattggtgcttatggcgtagaattacagcgagtttgcgcttatgttgattctgttgaactggcgacaggcaagcaagtgcgcttaactgccaaagagtgccgttttggctatcgcgacagtatttttaaacatgaataccaggaccgcttcgctattgtagccgtaggtctgcgtctgccaaaagagtggcaacctgtactaacgtatggtgacttaactcgtctggatcctacaacagtaacgccacagcaagtatttaatgcggtgtgtcatatgcgcaccaccaaactccctgatccaaaagtgaatggcaatgccggtagtttcttcaaaaaccctgttgtatctgccgaaacggctaaagcattactgagtcaatttccaacagcaccaaattacccccaggcggatggtagtgtaaaactggcagcaggttggcttatcgatcagtgccagctaaaagggatgcaaataggtggggctgcggtgcaccgtcaacaggcgttagttctcattaatgaagacaatgcaaaaagcgaagatgttgtacagctggcgcatcatgtaagacagaaagttggtgaaaaatttaatgtctggcttgagcctgaagtccgctttattggtgcaagtggtgaagtgagcgcagtggagacaattagttgaaataaagcgcagtggagacaatttcatgaaggataacaccgtgccactgaaattgattgccctgttagcgaacggtgaatttcactctggcgagcagttgggtgaaacgctgggaatgagccgggcggctattaataaacacattcagacactgcgtgactggggcgttgatgtctttaccgttccgggtaaaggatacagcctgcctgagcctatccagttacttaatgctaaacagatattgggtcagctggatggcggtagtgtagccgtgctgccagtgattgactccacgaatcagtaccttcttgatcgtatcggagagcttaaaagcggcgatgcttgcattgcagaataccagcaggctggccgtggtcgccggggtcggaaatggtttagcccttttggcgcaaacttatatttgagcatgttctggcgtctggaacaaggcccggcggcggcgattggtttaagtctggttatcggtatcgtgatggcggaagtattacgcaagctgggtgcagataaagttcgtgttaaatggcctaatgacctctatctgcaggatcgcaagctggcaggcattctggtggagctgactggcaaaactggcgatgcggcgcaaatagtcattggagccgggatcaacatggcaatgcgccgtgttgaagagagtgtcgttaatcaggggtggatcacgctgcaggaagcggggatcaatctcgatcgtaatacgttggcggccatgctaatacgtgaattacgtgctgcgttggaactcttcgaacaagaaggattggcaccttatctgagccgctgggaaaagctggataattttattaatcgcccagtgaaacttatcattggtgataaagaaatatttggcattagtcgcggaatagacaaacagggggctttattacttgagcaggatggaataataaaaccctggatgggcggtgaaatatccctgcgtagtgcagaaaaataagaaaggggagtattcgctcccctgcaaattatttgcgtagtctgacctcttctaccgcatgattagcacttttcgtcaggattaaactggcgcgctcacgagtaggtagaatattttgctttaagttcagccagttgatctctttccacaatgtcatggcagtcttaatcgcttcttctttagttaatttcgcgtagttatgaaaataggaatccgggtcggtaaaagccccttcgcggaatttcagaaaacggttgatataccatgtctgaagtaagtcttccggtgcatcaacatatatgctaaaatcgacaaaatcagaaacaaatacatgatgtggatcgtgtggataatccatcccgctctgtaagacatttaacccttcaagaattaaaatatcaggctgaacaaccgttttatctccatccgggatcacatcataaataagatgactgtaaacaggtgctgtaacgtttggcacgccggatttgagatcggaaacaaacttcaccaggcgatgcatatcatagctttccgggaagcctttcttcttcatcagaccacgttctttcagaacctgattagggtgaaggaagccatctgtagtgatcagttcaacacgacgatgttccggccaacggcttaatagcgcctgcaatacacgggcggttgtacttttccccaccgcgacactgccagcaatactgataatgtaaggaatgcgttgcccgttggtaccaagaaactgttccagaactgcctgacggcgcagattgctgcttatatagaagttcagcaaacgactcaaaggtaaatagatctcggcaacttcttctaagctgagatcttcattaatacctttgagacgggcgatctcatcttcgcttaacgtcataggtacggaatcacgcagagctgcccactggttgcggtcaaactgtaggtaaggcgtcattaacgtttgctcttttatactcataagcatgtttctggcggtcatagctctatcggcaaagcgatatttgccatggcgcgtcacagttctgttgaatgggttaatgggcaggagggtaacaccagatggggaggaataataagaaaaaatctctgccaggaagctatcgttgaaaagcaatgtgacagatattccatctgataaaaagaattatggtttagcaggagcgcattgttgagcacaatgatgttgaaaaagtgtgctaatctgccctccgttcggctgtttcttcatcgtgtcgcataaaatgtgaccaataaaacaaattatgcaattttttagttgcatgaactcgcatgtctccatagaatgcgcgctacttgatgccgacttagctcagtaggtagagcaactgacttgtaatcagtaggtcaccagttcgattccggtagtcggcaccatcaagtccggtggggttcccgagcggccaaagggagcagactgtaaatctgccgtcacagacttcgaaggttcgaatccttcccccaccaccaatttcggccacgcgatggcgtagcccgagacgataagttcgcttaccggctcgaataaagagagcttctctcgatattcagtgcagaatgaaaatcaggtagccgagttccaggatgcgggcatcgtataatggctattacctcagccttccaagctgatgatgcgggttcgattcccgctgcccgctccaagatgtgctgatatagctcagttggtagagcgcacccttggtaagggtgaggtcggcagttcgaatctgcctatcagcaccacttcttttctcctccctgttttttccttctgtttattgcattcaacaagtcgggcatgttgcctggttgatgtggtgatatcaccgatttatccgtgtcttagagggacaatcgatgtctaaagaaaagtttgaacgtacaaaaccgcacgttaacgtcggtactatcggccacgttgaccatggtaaaacaacgctgaccgctgcaatcactaccgtactggctaaaacctacggcggtgctgctcgcgcattcgaccagatcgataacgcgccggaagaaaaagctcgtggtatcaccatcaacacttctcacgttgaatacgacaccccgacccgccactacgcacacgtagactgcccggggcacgccgactatgttaaaaacatgatcaccggtgctgcgcagatggacggcgcgatcctggtagttgctgcgactgacggcccgatgccgcagactcgtgagcacatcctgctgggtcgtcaggtaggcgttccgtacatcatcgtgttcctgaacaaatgcgacatggttgatgacgaagagctgctggaactggttgaaatggaagttcgtgaacttctgtctcagtacgacttcccgggcgacgacactccgatcgttcgtggttctgctctgaaagcgctggaaggcgacgcagagtgggaagcgaaaatcctggaactggctggcttcctggattcttacattccggaaccagagcgtgcgattgacaagccgttcctgctgccgatcgaagacgtattctccatctccggtcgtggtaccgttgttaccggtcgtgtagaacgcggtatcatcaaagttggtgaagaagttgaaatcgttggtatcaaagagactcagaagtctacctgtactggcgttgaaatgttccgcaaactgctggacgaaggccgtgctggtgagaacgtaggtgttctgctgcgtggtatcaaacgtgaagaaatcgaacgtggtcaggtactggctaagccgggcaccatcaagccgcacaccaagttcgaatctgaagtgtacattctgtccaaagatgaaggcggccgtcatactccgttcttcaaaggctaccgtccgcagttctacttccgtactactgacgtgactggtaccatcgaactgccggaaggcgtagagatggtaatgccgggcgacaacatcaaaatggttgttaccctgatccacccgatcgcgatggacgacggtctgcgtttcgcaatccgtgaaggcggccgtaccgttggcgcgggcgttgtagcaaaagttctgagctaattgccgataacatttgacgcaatgcgcactaaaagggcatcatttgatgccctttttgcacgctttcgtaccagaacctggctcatcagtgattttctttgtcataatcattgctgagacaggctctgttgagggcgtataatccgaaaagctaatacgcgtttcgatttggtttgcctcgcgatcgcggggtgaaaatgtttgtagaaaacttctgacaggttggtttatgagtgcgaataccgaagctcaaggaagcgggcgcggcctggaagcgatgaagtgggtcgttgtggtggcattgctcctggtggcgattgtcggcaactatctttatcgcgacattatgctgccgctgcgtgcgctggccgtagtaattctgattgctgcagcgggtggtgtcgcgctgttaacgacaaaaggtaaagctaccgttgcttttgcccgtgaagcgcgtaccgaagtccgtaaggtcatttggccgactcgccaggaaacattgcacaccacgctgattgtggctgcggttaccgcagtaatgagtctgatcctgtggggactggatggtattctggttcgcctggtatcctttatcactggcctgaggttctgagatgtctgaagctcctaaaaagcgctggtacgtcgttcaggcgttttccggttttgaaggccgcgtagcaacgagcctgcgtgagcatatcaaattacacaacatggaagatttgtttggtgaagtcatggtaccaaccgaagaagtggttgaaatccgtggcggtcagcgtcgcaaaagcgaacgtaaattcttccctggctacgtcctcgttcagatggtgatgaacgacgcgagctggcacctggtgcgcagcgtaccgcgtgtgatgggcttcatcggcggtacttccgatcgtcctgcgccaatcagcgataaagaagtcgatgcgattatgaaccgcctgcagcaggttggtgataagccgcgtccgaaaacgctgtttgaaccgggtgaaatggtccgtgttaatgatggtccgttcgctgacttcaacggtgttgttgaagaagtggattacgagaaatctcgtctgaaagtgtctgtttctatcttcggtcgtgcgaccccggtagagctggacttcagccaggttgaaaaagcctaacccagcgatcaaaaaagcggcgatttaatcgttgcacaaggcgtgagattggaatacaatttcgcgccttttgtttttatgggccttgcccgtaaaacgattttttatatcacggggagcctctcagaggcgttattacccaacttgaggaatttataatggctaagaaagtacaagcctatgtcaagctgcaggttgcagctggtatggctaacccgagtccgccagtaggtccggctctgggtcagcagggcgtaaacatcatggaattctgcaaagcgttcaacgcaaaaactgattccatcgaaaaaggtctgccgattccggtagtaatcaccgtttacgctgaccgttctttcactttcgttaccaagaccccgccggcagcagttctgctgaaaaaagcggctggtatcaagtctggttccggtaagccgaacaaagacaaagtgggtaaaatttcccgcgctcagctgcaggaaatcgcgcagaccaaagctgccgacatgactggtgccgacattgaagcgatgactcgctccatcgaaggtactgcacgttccatgggcctggtagtggaggactaagaaatggctaaactgaccaagcgcatgcgtgttatccgcgagaaagttgatgcaaccaaacagtacgacatcaacgaagctatcgcactgctgaaagagctggcgactgctaaattcgtagaaagcgtggacgtagctgttaacctcggcatcgacgctcgtaaatctgaccagaacgtacgtggtgcaactgtactgccgcacggtactggccgttccgttcgcgtagccgtatttacccaaggtgcaaacgctgaagctgctaaagctgcaggcgcagaactggtaggtatggaagatctggctgaccagatcaagaaaggcgaaatgaactttgacgttgttattgcttctccggatgcaatgcgcgttgttggccagctgggccaggttctgggtccgcgcggcctgatgccaaacccgaaagtgggtactgtaacaccgaacgttgctgaagcggttaaaaacgctaaagctggccaggttcgttaccgtaacgacaaaaacggcatcatccacaccaccatcggtaaagtggactttgacgctgacaaactgaaagaaaacctggaagctctgctggttgcgctgaaaaaagcaaaaccgactcaggcgaaaggcgtgtacatcaagaaagttagcatctccaccaccatgggtgcaggtgttgcagttgaccaggctggcctgagcgcttctgtaaactaatgcctttacgtgggcggtgattttgtctacaatcttacccccacgtataatgcttaatgcagacgtatatccgagatattcgggttgtggcaaggcggcaactgagtgagtcgccaggagcatagctaactatgtgactggtgcgaatgaaggaagccaacgccgtcacaagctgaatagcgacggatagaaaagatttgttcgttggagcctggcctatccaggcctccgtcgaagaccgcaggagtttcgcaagaaacttaatcccctgcgtagacggtgacagaacgctaagattattcttttatattctggcttgtttctgctcaccgtaattaagacgctctctccgtttggaggagtgaagtgagttccagagattttctctggcaaacatccaggagcaaagctaatggctttaaatcttcaagacaaacaagcgattgttgctgaagtcagcgaagtagccaaaggcgcgctgtctgcagtagttgcggattcccgtggcgtaactgtagataaaatgactgaactgcgtaaagcaggtcgcgaagctggcgtatacatgcgtgttgttcgtaacaccctgctgcgccgtgctgttgaaggtactccgttcgagtgcctgaaagacgcgtttgttggtccgaccctgattgcatactctatggaacacccgggcgctgctgctcgtctgttcaaagagttcgcgaaagcgaatgcaaaatttgaggtcaaagccgctgcctttgaaggtgagctgatcccggcgtctcagatcgaccgcctggcaactctgccgacctacgaagaagcaattgcacgcctgatggcaaccatgaaagaagctagcgctggcaaactggttcgtactctggctgctgtacgcgatgcgaaagaagctgcttaatcgcagttatctttttaacgcattcgcttacgtataaacttattctgatattcaggaacaatttaaatgtctatcactaaagatcaaatcattgaagcagttgcagctatgtctgtaatggacgttgtagaactgatctctgcaatggaagaaaaattcggtgtttccgctgctgctgctgtagctgtagctgctggcccggttgaagctgctgaagaaaaaactgaattcgacgtaattctgaaagctgctggcgctaacaaagttgctgttatcaaagcagtacgtggcgcaactggcctgggtctgaaagaagctaaagacctggtagaatctgcaccggctgctctgaaagaaggcgtgagcaaagacgacgcagaagcactgaaaaaagctctggaagaagctggcgctgaagttgaagttaaataagccaacccttccggttgcagcctgagaaatcaggctgatggctggtgactttttagtcaccagcctttttgcgctgtaaggcgccagtagcgtttcacactgtttgactactgctgtgcctttcaatgcttgtttctatcgacgacttaatatactgcgacaggacgtccgttctgtgtaaatcgcaatgaaatggtttaagcgtgatagcaacaggcattgcggaaagtgttccattttccggtcaacaaaatagtgttgcacaaactgtccgctcaatggacagatgggtcgacttgtcagcgagctgaggaaccctatggtttactcctataccgagaaaaaacgtattcgtaaggattttggtaaacgtccacaagttctggatgtaccttatctcctttctatccagcttgacagctttcagaaatttatcgagcaagatcctgaagggcagtatggtctggaagctgctttccgttccgtattcccgattcagagctacagcggtaattccgagctgcaatacgtcagctaccgccttggcgaaccggtgtttgacgtccaggaatgtcaaatccgtggcgtgacctattccgcaccgctgcgcgttaaactgcgtctggtgatctatgagcgcgaagcgccggaaggcaccgtaaaagacattaaagaacaagaagtctacatgggcgaaattccgctcatgacagacaacggtacctttgttatcaacggtactgagcgtgttatcgtttcccagctgcaccgtagtccgggcgtcttctttgactccgacaaaggtaaaacccactctagcggtaaagtgctgtataacgcgcgtatcatcccttaccgtggttcctggctggacttcgaattcgatccgaaggacaacctgttcgtacgtatcgaccgtcgccgtaaactgcctgcgaccatcattctgcgcgccctgaactacaccacagagcagatcctcgacctgttctttgaaaaagttatctttgaaatccgtgataacaagctgcagatggaactggtgccggaacgcctgcgtggtgaaaccgcatcttttgacatcgaagctaacggtaaagtgtacgtagaaaaaggccgccgtatcactgcgcgccacattcgccagctggaaaaagacgacgtcaaactgatcgaagtcccggttgagtacatcgcaggtaaagtggttgctaaagactatattgatgagtctaccggcgagctgatctgcgcagcgaacatggagctgagcctggatctgctggctaagctgagccagtctggtcacaagcgtatcgaaacgctgttcaccaacgatctggatcacggcccatatatctctgaaaccttacgtgtcgacccaactaacgaccgtctgagcgcactggtagaaatctaccgcatgatgcgccctggcgagccgccgactcgtgaagcagctgaaagcctgttcgagaacctgttcttctccgaagaccgttatgacttgtctgcggttggtcgtatgaagttcaaccgttctctgctgcgcgaagaaatcgaaggttccggtatcctgagcaaagacgacatcattgatgttatgaaaaagctcatcgatatccgtaacggtaaaggcgaagtcgatgatatcgaccacctcggcaaccgtcgtatccgttccgttggcgaaatggcggaaaaccagttccgcgttggcctggtacgtgtagagcgtgcggtgaaagagcgtctgtctctgggcgatctggataccctgatgccacaggatatgatcaacgccaagccgatttccgcagcagtgaaagagttcttcggttccagccagctgtctcagtttatggaccagaacaacccgctgtctgagattacgcacaaacgtcgtatctccgcactcggcccaggcggtctgacccgtgaacgtgcaggcttcgaagttcgagacgtacacccgactcactacggtcgcgtatgtccaatcgaaacccctgaaggtccgaacatcggtctgatcaactctctgtccgtgtacgcacagactaacgaatacggcttccttgagactccgtatcgtaaagtgaccgacggtgttgtaactgacgaaattcactacctgtctgctatcgaagaaggcaactacgttatcgcccaggcgaactccaacttggatgaagaaggccacttcgtagaagacctggtaacttgccgtagcaaaggcgaatccagcttgttcagccgcgaccaggttgactacatggacgtatccacccagcaggtggtatccgtcggtgcgtccctgatcccgttcctggaacacgatgacgccaaccgtgcattgatgggtgcgaacatgcaacgtcaggccgttccgactctgcgcgctgataagccgctggttggtactggtatggaacgtgctgttgccgttgactccggtgtaactgcggtagctaaacgtggtggtgtcgttcagtacgtggatgcttcccgtatcgttatcaaagttaacgaagacgagatgtatccgggtgaagcaggtatcgacatctacaacctgaccaaatacacccgttctaaccagaacacctgtatcaaccagatgccgtgtgtgtctctgggtgaaccggttgaacgtggcgacgtgctggcagacggtccgtccaccgacctcggtgaactggcgcttggtcagaacatgcgcgtagcgttcatgccgtggaatggttacaacttcgaagactccatcctcgtatccgagcgtgttgttcaggaagaccgtttcaccaccatccacattcaggaactggcgtgtgtgtcccgtgacaccaagctgggtccggaagagatcaccgctgacatcccgaacgtgggtgaagctgcgctctccaaactggatgaatccggtatcgtttacattggtgcggaagtgaccggtggcgacattctggttggtaaggtaacgccgaaaggtgaaactcagctgaccccagaagaaaaactgctgcgtgcgatcttcggtgagaaagcctctgacgttaaagactcttctctgcgcgtaccaaacggtgtatccggtacggttatcgacgttcaggtctttactcgcgatggcgtagaaaaagacaaacgtgcgctggaaatcgaagaaatgcagctcaaacaggcgaagaaagacctgtctgaagaactgcagatcctcgaagcgggtctgttcagccgtatccgtgctgtgctggtagccggtggcgttgaagctgagaagctcgacaaactgccgcgcgatcgctggctggagctgggcctgacagacgaagagaaacaaaatcagctggaacagctggctgagcagtatgacgaactgaaacacgagttcgagaagaaactcgaagcgaaacgccgcaaaatcacccagggcgacgatctggcaccgggcgtgctgaagattgttaaggtatatctggcggttaaacgccgtatccagcctggtgacaagatggcaggtcgtcacggtaacaagggtgtaatttctaagatcaacccgatcgaagatatgccttacgatgaaaacggtacgccggtagacatcgtactgaacccgctgggcgtaccgtctcgtatgaacatcggtcagatcctcgaaacccacctgggtatggctgcgaaaggtatcggcgacaagatcaacgccatgctgaaacagcagcaagaagtcgcgaaactgcgcgaattcatccagcgtgcgtacgatctgggcgctgacgttcgtcagaaagttgacctgagtaccttcagcgatgaagaagttatgcgtctggctgaaaacctgcgcaaaggtatgccaatcgcaacgccggtgttcgacggtgcgaaagaagcagaaattaaagagctgctgaaacttggcgacctgccgacttccggtcagatccgcctgtacgatggtcgcactggtgaacagttcgagcgtccggtaaccgttggttacatgtacatgctgaaactgaaccacctggtcgacgacaagatgcacgcgcgttccaccggttcttacagcctggttactcagcagccgctgggtggtaaggcacagttcggtggtcagcgtttcggggagatggaagtgtgggcgctggaagcatacggcgcagcatacaccctgcaggaaatgctcaccgttaagtctgatgacgtgaacggtcgtaccaagatgtataaaaacatcgtggacggcaaccatcagatggagccgggcatgccagaatccttcaacgtattgttgaaagagattcgtagcctgggtatcaacatcgaactggaagacgagtaattctcgctcaaacaggtcactgctgtcgggttaaaacccggcagcggattgtgctaactccgacgggagcaaatccgtgaaagatttattaaagtttctgaaagcgcagactaaaaccgaagagtttgatgcgatcaaaattgctctggctagcccagacatgatccgtagttggtctttcggtgaagttaaaaagccggaaaccatcaactaccgtacgttcaaaccagaacgtgacggccttttctgcgcccgtatctttgggccggtaaaagattacgagtgcctgtgcggtaagtacaagcgcctgaaacaccgtggcgtcatctgtgagaagtgcggcgttgaagtgacccagactaaagtacgccgtgagcgtatgggccacatcgaactggcttccccgactgcgcacatctggttcctgaaaagcctgccgtcccgtatcggtctgctgctcgatatgccgctgcgcgatatcgaacgcgtactgtactttgaatcctatgtggttatcgaaggcggtatgaccaacctggaacgtcagcagatcctgactgaagagcagtatctggacgcgctggaagagttcggtgacgaattcgacgcgaagatgggggcggaagcaatccaggctctgctgaagagcatggatctggagcaagagtgcgaacagctgcgtgaagagctgaacgaaaccaactccgaaaccaagcgtaaaaagctgaccaagcgtatcaaactgctggaagcgttcgttcagtctggtaacaaaccagagtggatgatcctgaccgttctgccggtactgccgccagatctgcgtccgctggttccgctggatggtggtcgtttcgcgacttctgacctgaacgatctgtatcgtcgcgtcattaaccgtaacaaccgtctgaaacgtctgctggatctggctgcgccggacatcatcgtacgtaacgaaaaacgtatgctgcaggaagcggtagacgccctgctggataacggtcgtcgcggtcgtgcgatcaccggttctaacaagcgtcctctgaaatctttggccgacatgatcaaaggtaaacagggtcgtttccgtcagaacctgctcggtaagcgtgttgactactccggtcgttctgtaatcaccgtaggtccatacctgcgtctgcatcagtgcggtctgccgaagaaaatggcactggagctgttcaaaccgttcatctacggcaagctggaactgcgtggtcttgctaccaccattaaagctgcgaagaaaatggttgagcgcgaagaagctgtcgtttgggatatcctggacgaagttatccgcgaacacccggtactgctgaaccgtgcaccgactctgcaccgtctgggtatccaggcatttgaaccggtactgatcgaaggtaaagctatccagctgcacccgctggtttgtgcggcatataacgccgacttcgatggtgaccagatggctgttcacgtaccgctgacgctggaagcccagctggaagcgcgtgcgctgatgatgtctaccaacaacatcctgtccccggcgaacggcgaaccaatcatcgttccgtctcaggacgttgtactgggtctgtactacatgacccgtgactgtgttaacgccaaaggcgaaggcatggtgctgactggcccgaaagaagcagaacgtctgtatcgctctggtctggcttctctgcatgcgcgcgttaaagtgcgtatcaccgagtatgaaaaagatgctaacggtgaattagtagcgaaaaccagcctgaaagacacgactgttggccgtgccattctgtggatgattgtaccgaaaggtctgccttactccatcgtcaaccaggcgctgggtaaaaaagcaatctccaaaatgctgaacacctgctaccgcattctcggtctgaaaccgaccgttatttttgcggaccagatcatgtacaccggcttcgcctatgcagcgcgttctggtgcatctgttggtatcgatgacatggtcatcccggagaagaaacacgaaatcatctccgaggcagaagcagaagttgctgaaattcaggagcagttccagtctggtctggtaactgcgggcgaacgctacaacaaagttatcgatatctgggctgcggcgaacgatcgtgtatccaaagcgatgatggataacctgcaaactgaaaccgtgattaaccgtgacggtcaggaagagaagcaggtttccttcaacagcatctacatgatggccgactccggtgcgcgtggttctgcggcacagattcgtcagcttgctggtatgcgtggtctgatggcgaagccggatggctccatcatcgaaacgccaatcaccgcgaacttccgtgaaggtctgaacgtactccagtacttcatctccacccacggtgctcgtaaaggtctggcggataccgcactgaaaactgcgaactccggttacctgactcgtcgtctggttgacgtggcgcaggacctggtggttaccgaagacgattgtggtacccatgaaggtatcatgatgactccggttatcgagggtggtgacgttaaagagccgctgcgcgatcgcgtactgggtcgtgtaactgctgaagacgttctgaagccgggtactgctgatatcctcgttccgcgcaacacgctgctgcacgaacagtggtgtgacctgctggaagagaactctgtcgacgcggttaaagtacgttctgttgtatcttgtgacaccgactttggtgtatgtgcgcactgctacggtcgtgacctggcgcgtggccacatcatcaacaagggtgaagcaatcggtgttatcgcggcacagtccatcggtgaaccgggtacacagctgaccatgcgtacgttccacatcggtggtgcggcatctcgtgcggctgctgaatccagcatccaagtgaaaaacaaaggtagcatcaagctcagcaacgtgaagagcgttgtgaactccagcggtaaactggttatcacttcccgtaatactgaactgaaactgatcgacgaattcggtcgtactaaagaaagctacaaagtaccttacggtgcggtactggcgaaaggcgatggcgaacaggttgctggcggcgaaaccgttgcaaactgggacccgcacaccatgccggttatcaccgaagtaagcggttttgtacgctttactgacatgatcgacggccagaccattacgcgtcagaccgacgaactgaccggtctgtctagcctggtggttctggattccgcagaacgtaccgcaggtggtaaagatctgcgtccggcactgaaaatcgttgatgctcagggtaacgacgttctgatcccaggtaccgatatgccagcgcagtacttcctgccgggtaaagcgattgttcagctggaagatggcgtacagatcagctctggtgacaccctggcgcgtattccgcaggaatccggcggtaccaaggacatcaccggtggtctgccgcgcgttgcggacctgttcgaagcacgtcgtccgaaagagccggcaatcctggctgaaatcagcggtatcgtttccttcggtaaagaaaccaaaggtaaacgtcgtctggttatcaccccggtagacggtagcgatccgtacgaagagatgattccgaaatggcgtcagctcaacgtgttcgaaggtgaacgtgtagaacgtggtgacgtaatttccgacggtccggaagcgccgcacgacattctgcgtctgcgtggtgttcatgctgttactcgttacatcgttaacgaagtacaggacgtataccgtctgcagggcgttaagattaacgataaacacatcgaagttatcgttcgtcagatgctgcgtaaagctaccatcgttaacgcgggtagctccgacttcctggaaggcgaacaggttgaatactctcgcgtcaagatcgcaaaccgcgaactggaagcgaacggcaaagtgggtgcaacttactcccgcgatctgctgggtatcaccaaagcgtctctggcaaccgagtccttcatctccgcggcaagcttccaggagaccactcgcgtgctgaccgaagcagccgttgcgggcaaacgcgacgaactgcgcggcctgaaagagaacgttatcgtgggtcgtctgatcccggcaggtaccggttacgcgtaccaccaggatcgtatgcgtcgccgtgctgcgggtgaagctccggctgcaccgcaggtgactgcagaagacgcatctgccagcctggcagaactgctgaacgcaggtctgggcggttctgataacgagtaatcgttaatccgcaaataacgtaaaaacccgcttcggcgggtttttttatggggggagtttagggaaagagcatttgtcagaatatttaaggaatttctgaatactcataatcaatgtagagatgactaatatcctgaaactgactgaactaattgagtcaaactcggcaaggattcgatactattcctgtgtaactttcttaaggaacgagaatgaaacaggaagtggaaaagtggcgaccttttggacatccggatggtgatattcgtgatttaagttttcttgatgctcatcaggctgtctacgttcagcatcatgagggcaaagagcctttagagtatcgcttttgggttacctactctcttcactgcttcacaaaagattatgaacatcagacgaacgaagaaaaacaaagcttaatgtaccacgcgcctaaagaatctcgtcccttctgccagcaccgttataacttagcgcgcacacacttaaaaagaactattttggcgctgccagaaagcaacgttattcatgccgggtatggtagctatgccgtgattgaggtggacttagacggaggagataaggcattttactttgttgcgttcagggctttcagggaaaagaaaaaactccgtttgcatgtaactagcgcttatcccatttctgaaaaacagaaaggtaaaagtgtgaaatttttcaccattgcctacaacttattgagaaataagcagcttcctcagcccagtaaataacaaaacccaccttaaggtgggtttcgccagagaattatctctggtattcagaacgccattaccggactttgccttgaccttgcgataatcgcaggttgcgggatgtctgaatttcttcagtctgctgcatcctggaagatgagaacatgtgttcttattttcgtctctatcatagttgagtatttactctcttacaatcagatctctttcattgctcaacaggcgatggcttcagactttgcattacggaatttttaagaaaggcagggcgaaacgaggaagaagcttttcgccctggacaacattcctgctgacggcactaccataaaaaaacacaacgctttcaacaaccttgcgtttttcatcttccgtagcggctcggaataaatttacgttcttacattccgtctcatagtctttggctggcgcgtcccagatagctgtcccagtctttccataccggctgcaaaccctgagcggttaacgcggcagcaaccgcttccggtctgcgatcgtcgtgcggactgaactgttccaactcggggtgattatcggcatagccacctggctgcgttttgctgaaggcgctgacgttattgatcgccagcggaataacgcgatcgcgaaaccacggactttcccgcgtggagagactcagttcaatctccggtgcaagcagtcggaaggcgcagatggtttgcactaactggcgttcatccataatgctcgcaggctcaatgccgccagtacacgggcgcaggcgcggaaaggagacagagtaacggctttgccagtaatgctgttgcagccatagcaaatgttcggcaaccatatagctgtcaacgcgccagttgtcggaaaggccaattagcgcgccgaggcctatcttatcaatccccgcacgccccagccgatccggcgtttccagccgccagaagaagtcctgttttttgcctttcagatgatggcgggcataagtcgcctcgtgatatgtctcctgataaaccatcacgccatccagaccaagttgctttaactcggcgtattccgtctccgccagcggttgcacttccatctgtagactagagaactgttcacgaagggcagggagatgacgacgaaagtaatccatccccactttcgcctgatgttcaccagtgactaacagcagatgttcaaagcccatctcccgtatagcggcactttccctggcaatatccgcttcatccagcgttttgcgcttgatgcgattactcatggaaaatccacagtacgtgcagtcgttagcgcaaagattggaaagataaagcgggacgtagaaactaactgtgttgccaaatcgctgacgggtcagacgctgcgcccgttgggccagttgttccagatagccactggcggcagggcttaacagcgccatcatgtcgtcgcgggtgagttggctggcatttagcgcccgctctacgtcagcagccgttttgccgttgatacgcaggcggatgtcgtcccagtccagttgtcgccagcgatcgctgaaggttttcatgcgcttgcctccagaaatccggtcagcgggctggtggcatgagcaaaataactgcggctgcccggtccggactgacgtgccagtaggcctgcttctaccgccagacgaaatgccttcgccatgttgacgggatcgtccgcgacggcaatcgccgtattcactaacaccgcgtcggcccccatttccagcgcctgcgcggcatggctgggaacgccgatgccagcatcgacaaccaccggcactgtggcctgctggataataatctccagcatggcgcgggtttccagtccctgattgctgccaatcggcgcgccgagcggcatcaccgctgcacagccgacttcttccagacgtttacacaataccggatcggccccgcagtaaggcagcacgacaaatccctgttgtaccagcgtttcggcggctttcagggtttcgatgggatcgggcaacagccagcgggcgtcagggtgaatctctaattttaaccagtttgtgcctaacgcttcacgagccagatgggcggcgaaaatggcttcttccgctgttttcgccccggatgtatttggcagcagggtcacacccgccgcgataagcggttcgaggatagcgtcgttgtgctggcgcaagtcgacacgtttcatcgccagtgtcaccagctggctgccggaagcgcggatcgcctccaccatcagttgactagaagcgaatttccctgtgccggtaaacagatgactatcaaacgttttgtccgcaatacgtaacatttcaaccccctgcaataacctgaaaaagcaggatctggtcgccatcctgcacgatatgttgcgcccactgctcacgcgggacgatttgctgattaatcgccagagccgcgcccgcttgtcgttggtcgagttgctccagtagttcgtgaacagtttgcccggcggcgcactgcatcgcttgatcgttaaacaggatctgcattgcttcctccgcataccgggcaaccactggcgcggcgcaacgccaggctgcgccactggctgcttttaccgtcgaacagtcggagttctcccgcaggtgtctctataccgcttaataacttaatggcttccagtgcctgcaaagtgcccataaccccgaccaccgggccaaccacgcccgccgtgcggcagttgcgttctggctcctggttatctggccacaggcagcggtaacacccctgctcccagggcggcgtcagtaccatcaactgaccgccaaatccgaccgcgctggcggtgataagcggcgtgttgagtgccacgcaggcggcattaatctcctggcgagtcgccatattgtcggtacagtcgagcaccacatcggcccgtgcaaccgcatcttttaacgcctcacccgttaaccgttgttgtaatgctgtcagttgaatgtcgggattcaactgtgtcagtcgctgttggctgacctggcttttcgggcgatcgatatcttcagtggtaaagaggatttgtcgttgcagattgcttaaatgcacatcgtcgtcatctgccagtaccagcgtcccgacgccagcgcccgccaggtacagcgcagcaggtgtacccagcccgcccagaccgataatcagcacctggctgtcgagcagtttttgctgcccgtccagagcgatatcgtcgagcaggatttggcggctataacgcataaagtcacggtcattcatcgccaactcctgcaatttccagcaactgtgccgttgccaaacgccagtctgcggcttgagtaatggcgctgacgacggcgatactgccgacacccgttgctatcaccgcaggcgcgcgtgccagactgataccgccaatcgccacggtgggataatccgccagtcgctcaacatgccgtgccagctgttccagcccctgcggtgcagaaggcatctgtttggtttgcgtcgggaacacatgtcccagcgcgatataagaggggcgtgctgccagcgcgacgtcgatttccatatcgtcatgtgtgctaacgcccagccgcaggcctgccgcgcggatggcattgagatcggtggcttgcaaatcttcctgccccaaatggacgccatacgcctgatgcttgatcgccagccgccagtaatcgttgataaacaatcgcgcgttatagcggcggcccagcgcaattgccgccacgacatcggcttccacctcttcatcgcgccgatctttgatgcgtagctggagagtacgtacgcctgcatccaacagacgttcgatccactgtacgctgtccaccaccgggtacagtccactacgaaaaggtacaggaggaaaatcaggctgatacatcacgcttcctccttacgcaggtagatttctccgcctctggcacggaagttctcgctcatatccgccattcccatttcaatagtttgcgtggcggcgtaatcacgcacttcctggctgattttcatgctgcagaatttcggcccacacatggagcaaaaatgggcgactttaccactctcttgcggcagggtttcatcgtgataagcgcgggcggtaaacgggtcgagggccagattaaactggtcttcccagcgaaattcgaagcgggctttgctcatggcgttatcgcgaatttgcgcgcccggatgccctttcgccaggtcagcggcgtgggcagcaatcttataggtgataagcccctgcttaacatcttctttattgggcagacccagatgctcttttggcgttacgtaacagagcatcgcgcagccaaaccagccaatcatcgccgcaccaatcccgctcgtgaagtggtcatagcccggcgcaatatcggtagttagcggccccagagtgtaaaacggcgcttcgtggcagtgctctaactcctcggtcatattgcggcggatcatctgcatcggcacgtggcctgggccttcaatcatcacctgcacgtcatattcccaggcaattttggtcagttcgcccagcgtatgcagctcggcaaactgcgcttcatcgttggcgtcctgaatagaaccggggcgcagaccgtcgcccaggctcaggctaacgtcataagcggcacagatttcacaaatttcgcggaagtgttgatagaggaaattttcctgatgatgggagaggcaccatttcgccataatgctaccgccgcgagagacgataccggtcaggcgtttcgcggtcatcggcacatagcgcagcagtacgcccgcatggatagtgaagtaatccacaccttgctcggcctgttccagcagcgtgtcgcggaacgcttcccaggtaagatcttcggcgatcccgttaaccttctccagcgcctggtagatcggcactgtaccgatcggcaccgggctgttacgcaaaatccactcgcgggtttcgtgaatatagcgaccggtggagagatccatcaccgtatccgctccccagcgcgtggaccataccagcttttccacttcttcttcgatggaagaggtgaccgcgctgttgccgatattggcgttaacttttaccaggaaattgcgaccaataatcatcggctcgctttccggatgattaatgttggccgggataatcgcacgtccggcagcaacttcatcacggacaaattccgcagtgatattttccggcagatgtgcgccaaagctcattcccggatgctggtggcgtaaaacctcgctacggatgcgctcgcggcccatattctcgcggatggcgatgaattccatttccggcgtgatgatgccctggcgggcgtagtgcagttgggtgacacggcgtcctgctttggcgcgttttggtgttagtacgccgctaaaacgcagttcgtcgaggccatcatctgccagccgcgctttagtgtaatcggaactgcgcacggtaagttcttcggtatcgccgcgcgcatcgatccacggctggcgtagttttgccagcccttgctgcacgttaatggcaatctgcggatcaccatacgggccggaggtgtcgtagaccggaatcgcttcgttttcttcgtactgcggctgttctttgctaccgccaattagcgtcgggctaagctggatctcacgcatcggcacgcgcacgccggggtgtgtgccagtgatataaatgcgtttactgttgggaaaggcggtgccttccagggtgtcgataaaatgttgggcccgggcgcgttgttcgcggcgggtcagttttgttgcagacatagctcattccaaaaagttaaggacgtggcttgtcagacgacggatgaagcaagagacgatcgccgcaggggcgatgcgatagcagattaactcttgttcccttcgcaggtattagcctgatcaggttccgcggatcccgaataaacggtctcagccagttaaggcactccgacaagaaattagccccgcaaatggggcattgaatgtaaattacgcgttaacagcgcagaactcaagcaggatgtttgacgcgggcggcgtcaagcaccagcagaatcagcttatcttccagcacaaagcgcgcttccagcgcctcgccgatgtcagataaaacctgttgaaactcaaggtaattatcatgatcgatggcggtttccagactggaatcgtagtaatccataatctgttgagtattggcttcgagttgcggccaaatcttcgcggcgcgcgcgagttgcccgttgccttccagcttatgaagaatgcgctcataaatactgaaatgtccggcagacaagtaatcgaccaggctctgacaaaaatcatcaagggctttttcgtttagcctcatgtagctttctttgccaggcttaatgccaaccagattgtagtaagccacgagcagatgcttacgtacatgtagccagcgatcaaccagtttgttacttcctctgacgcgctccgtcaggttatcgagctggttaagcatgattgactccgcaagtttgtattcaaaaactgctcagtgagaaatgtaaaaaccatgttaaacatgccagtgatgcaaaggtagtgcaagagctatggatcgtataattgaaaaattagatcacggctggtgggtcgtcagccatgaacaaaaattatggttgccgaagggagaattgccatatggcgaagcggcaaatttcgatcttgtgggtcagcgcgcactacaaatcggcgaatggcagggggaacctgtttggttagtacaacagcagcggcgtcacgatatggggagcgtacgtcaggtcattgatctcgatgttgggctgtttcaactggccggacgaggcgtacaactggcggagttttaccgaagtcataaatactgtggttactgcgggcatgaaatgtatccgagcaaaaccgaatgggcgatgctgtgcagccattgccgtgagcgttactacccgcaaatcgccccctgcattattgttgccatccgtcgcgatgatagcatcctcctcgcccagcatacccgccatcgtaacggtgtccatacagtacttgccggattcgtcgaagtgggcgaaaccctcgagcaggcagtcgcgcgggaagtgatggaagagagcggaattaaagttaaaaacttgcgttacgtgacttctcagccgtggccgtttcctcagtctttaatgaccgcgtttatggcggaatatgacagcggcgacatcgtgatcgacccgaaagaattgctcgaggcgaactggtatcgctatgacgatttgccgttactcccgccgcccggcaccgtagcgcgccgtctgatagaagatacggtggcgatgtgtcgggcagagtatgagtgatgatacactgaccgcctgacgcactaaggaacagccaaaatgaccgaacttaaaaacgatcgttatctgcgggcgctgctgcgccagcccgttgatgtcactccagtatggatgatgcgccaggcgggtcgctatctaccggaatataaagccacgcgcgcccaggcaggcgattttatgagcctgtgcaaaaacgccgagctggcgtgcgaagtgactttgcaaccgctgcgtcgctacccgctggatgcggcgatcctcttttccgatatcctcaccgtgccggacgcgatggggttagggctctattttgaagccggagaaggtccgcgttttaccagcccagtcacctgcaaagctgacgtcgataaactgccaattccggacccggaagatgaactgggttacgtgatgaacgcggtgcgtaccattcgtcgcgaactgaaaggcgaagtgccgctgattggtttttccggcagcccgtggacgctggcgacctacatggtggaaggcggcagcagcaaagccttcaccgtgatcaaaaaaatgatgtatgccgatccgcaggcgctgcacgctctgctcgataaactggcgaaaagcgtcactttgtatctgaatgcgcagattaaagccggtgctcaggcagtgatgattttcgacacctggggcggcgtgcttaccgggcgcgattatcaacagttcagcctctattacatgcataaaattgttgatggtttactgcgtgaaaacgacggtcgccgcgtaccggtcacgctgtttaccaaaggcggcggacagtggctggaagccatggcagaaaccggttgcgatgcgctgggcctcgactggacaacggacatcgccgatgcgcgccgccgtgtgggcaataaagtcgcgttgcagggtaatatggatccgagcatgctgtacgcgccgcctgcccgcattgaagaagaagtagcgactatacttgcaggtttcggtcacggcgaaggtcatgtctttaaccttggtcacggcattcatcaggatgtgccgccagaacatgctggcgtgttcgtggaggcagtgcatcgactgtctgaacagtatcaccgctaaggagtgattatggatctcgcgagtttacgcgctcaacaaatcgaactggcttcttctgtgatccgcgaggatcgactcgataaagatccaccggatctgatcgccggagccgatgtcgggtttgagcagggcggagaagtgacgcgagcggcgatggtgctgctgaaatatcccagccttgagctggtcgagtataaagttgcccgcatcgccaccaccatgccttacattccaggttttctttccttccgcgaatatcctgcgctgctggcagcgtgggagatgctgagccaaaagccggatttagtgtttgtcgatggtcatgggatcagccatcctcgccgtcttggcgtcgccagccattttggcttattggtggatgtgccgaccattggcgtggcgaaaaaacggctctgcggtaaattcgaaccgctctccagcgaaccgggcgcgctggccccactgatggataaaggcgagcagctggcctgggtctggcgcagcaaagcgcgctgtaacccgttgtttatcgctaccggccatcgggtcagcgtggacagcgcgctggcgtgggtacaacgctgcatgaaaggctatcgtctgccggagccaacgcgctgggcggacgcggtggccagcgaacgtccggcgttcgtgcgctatacagcaaatcagccctaattcaggtaaactgcggataatttccgtatttgagaactcaacatgttacaaaacccaattcatctgcgtctggagcgcctggaaagctggcagcatgtcactttcatggcttgcttatgcgaacgcatgtaccccaattacgccatgttctgccagcaaaccggttttggtgatgggcaaatttaccgtcgcattctcgatctcatctgggaaacgctgaccgttaaagacgcaaaagtaaatttcgacagccaactggagaaatttgaagaagcgattcctagtgccgacgatttcgatctgtacggcgtttatccggcaatcgatgcctgcgtggcgttaagtgaactggtccatagccgtttgagtggtgaaacgctcgaacacgcggtggaagtgagtaagacctccatcacgaccgttgcgatgctggaaatgactcaggctggtcgcgaaatgagcgatgaagagcttaaagaaaacccagctgtagagcaagaatgggacattcagtgggaaatattccgacttttagctgagtgcgaagaacgcgatatcgagctgataaaaggccttagggcagacctgcgtgaggcgggtgagagcaatattggtataatttttcagcaataagaccagaaaacgtgatttaacgcctgatttgtcgtacctggagtcttccctttcgcccccgtctggtctacatttggggggcgaaaaaaagtggctatcggtgcgtgtatgcaggagagtgctattctggcatttccgtcgcactcgatgcttagcaagcgataaacacattgtaaggataacttatgaacaagactcaactgattgatgtaattgcagagaaagcagaactgtccaaaacccaggctaaagctgctctggagtccactctggctgcaattactgagtctctgaaagaaggcgatgctgtacaactggttggtttcggtaccttcaaagtgaaccaccgcgctgagcgtactggccgcaacccgcagaccggtaaagaaatcaaaattgccgcagctaacgtaccggcatttgtttctggcaaggcactgaaagacgcagttaagtaagattgcgtggcagtgaacagttttaacgaaggggtggttagtccccttttgtctttctggcgtcgaagtttgatgctggctggcgctctgcttctcactgcctgtagtcataactctagtcttcctccctttaccgccagtggatttgctgaagaccagggcgcggtacgcatctggcgaaaagacagcggcgataatgtgcatctgcttgccgtgtttagcccgtggcgcagtggcgataccacgacgcgagagtatcgctggcagggcgataacctcacgctcatcaatatcaatgtttacagcaaaccgccggtgaatattcgcgcgcgttttgacgatcgcggtgatctgagctttatgcaacgtgaatccgatggggaaaagcagcagctttctaacgaccaaatcgatttataccgttatcgtgctgatcagatccgccagattagcgatgccttacgtcaggggagagtcgtgctgcgccaggggcgctggcatgcgatggaacagaccgtgaccacctgcgaagggcaaaccattaaacctgatttagatagccaggcgatagcgcatatcgagcgccgccagagccgctcttctgttgatgtcagcgtggcatggctggaagcgcccgaaggtagccaattactgttagtggcaaactctgatttctgtcgctggcaacccaacgagaaaacgttctgatttaccagtggcccatacccatatgaccgccaccaccgcagccgccgtagcccatgcccattccggctccgcgcggaatacccgcttcagccatcgcgatatctcgtttcacccgtaactcatctaagctctgacgcaaattctccatctctttggcgaccgcgttaattttgctgctatccggtgggttcgcggctaacagggcattgtattcataacgcttcgtcaccagttgctgttgcagtgcgctgctttgagcgtaaaagtcattatggattttctgccacgctgtctgttgttcgctggtcaaaggcgcggcattttgctgccacataccgtgtccgccgtgagcaaatgcagatgtgcttcccatcgccattgcactaagcgccatcattaccagggcaattttcgtgttccgtttcatggttaatcctccagtggttgtcttacttcgggtattgcatcttccgtgccaacgatgaaacgctgatatgacgggtaatctggcatgataaacgagtaaaaatgactcgcctgctgcgggtagcgagtcatttttactcattgaaacttaagcctttgtgttacagcgcagggtaagcgctgataaaagatggcatgatttctgctgtcagaaagggatgagcaggcaaagaagaagatgcgttttatgcaacgttctaaagactccttagctaaatggttaagcgcgatcctccccgtggtcattgttgggctggtgggattgtttgcggtaactgtgattcgtgattatgggcgggcaagcgaggcagaccgccaggcattactggaaaaaggtaatgtgcttatccgcgctctggagagcggaagccgcgtagggatggggatgcgaatgcaccatgtacagcaacaggcgcttctggaagagatggcgggacagccgggagtgttgtggttcgcagtcaccgatgcgcagggcatcattattcttcatagcgaccccgataaggtcgggcgtgcgctctatagcccggatgaaatgcagaaattaaagccagaggaaaactcccgctggcggctgcttgggaaaacggaaactacgcctgcacttgaggtctatcgtttgttccagccaatgagtgcgccctggcggcatggaatgcacaatatgccgcgctgtaacggcaaagctgtgccacaagtagatgcacaacaggctatttttatcgccgttgatgccagtgatctggttgcaacccagagtggggaaaagcgcaataccctgattatcctcttcgccctggcgacggtcttgctggcaagcgtattgagtttcttctggtatcgccgctatctgcgcagccgccagcttctacaagatgaaatgaagcgcaaagagaagctggtggcgctggggcatcttgcggcaggcgttgcccacgaaatccgtaacccactttccagcattaaaggactggcgaaatactttgccgagcgcgcgcctgcagggggagaagcgcatcaactggcgcaggtgatggcgaaagaggccgaccgtttaaaccgcgtggtaagcgagttgctggaactggttaagccaacgcatctggctttgcaggcggtggatctcaacacgctgattaaccacagtttacagctggtaagtcaggatgcaaacagccgggagatccagttacgctttaccgccaacgacacattaccggaaattcaggccgacccggacaggctgactcaggtcctgttgaatctctatctcaatgctattcaggcgattggtcagcatggcgtgattagcgtgacggccagcgaaagcggcgcgggcgtgaaaatcagcgttaccgacagcggtaagggaattgcggcagatcagcttgatgccatcttcactccgtacttcaccactaaagccgaaggcaccggattggggctggcggtcgtgcataatattgttgaacaacacggtggtacaattcaggtcgcaagccaggagggaaaaggcagtacgttcaccctctggcttccggtcaatattacgcgtaaggacccacaaggatgacgcacgataatatcgatattctggtggtggatgatgacattagccactgcactattttgcaggctttactgcgcggctggggctataacgtcgcgctggcgaacagcgggcgacaggcgttggagcaggtgcgggaacaggtttttgatcttgtgctttgcgatgtgcgaatggcggagatggacggcatcgccacgctgaaagagatcaaagcgttaaacccggcaattccggtgctgattatgactgcgtactccagcgtcgagacggcggtagaggcactgaaaactggggcgctggattatctcatcaagccgctggatttcgataacctacaggcgacgctggaaaaagcgctcgcgcatacgcacagtattgatgctgaaacacctgcggtgactgccagccagttcggtatggtcggtaaaagcccggcgatgcaacacctgctcagtgaaatcgccctcgtcgcgccaagcgaagccacggtactgatccacggcgattccggcaccggtaaagagctggtcgccagggcgattcacgccagtagcgcacgtagcgaaaaaccgctggtaacgctcaactgtgcggcactcaacgaatccttgctggaatctgaattgttcggtcacgaaaaaggggcgtttactggagccgataaacgccgggaagggcgctttgttgaggcggacggcggcacgctgtttctcgatgaaattggcgatatcagcccgatgatgcaggtgcgtctgctgcgtgcgattcaggagcgcgaagttcagcgtgtcggtagcaaccagattatcagcgttgatgtccggctgattgcggcgacccatcgcgatcttgccgcagaggtgaatgccgggcgttttcgccaggatctctactatcgcctgaatgtggtggcgattgaagtaccaagcctgcggcaacggcgggaagatatccctctgctggctggccattttctgcagcgctttgccgagcgtaatcgcaaggcggtaaaaggttttacgccccaggcgatggatctgttgattcattacgactggccgggaaatattcgtgagctggaaaacgcggtggaacgggcagtggtgctgctgaccggggaatatatttccgaacgcgagctgccgctggcgattgccagtacgccgatcccgctgggacaaagtcaggatattcagccgttggtggaagtggaaaaagaggtgattctggcggcgctggagaaaacgggcggcaacaaaaccgaagccgcccgtcagttagggatcacgcgcaaaacgctattggcaaaactgagccgttaattctgctcgcgttcgatagcgcgccagccgatatctttccggcagaagcagtcgtcccagtggatatcggtcattaaggcataggcgcgtttctgcgcttctgccacggtatgacccagcgcggtgacgcacagtacgcgcccgccgttggtcactacctgctcgtcatccgccagttttgtgcccgcgtggaacactttgccgcctgccacttcttccagcggcaggccgtggatcacgtcaccggtgcggtaatcacccggatatccacccgcagccatcaccacgccgagagaagcgcgttcatcccactcggacgttttctcgtccagtttgctttcacaggccgccaggcagagctcaaccagatcggacttcatgcgcagcataatcggctgggtttccggatcgccaaagcggcagttaaattcaataaccttcggattgccctgtttgtcgatcatcaggcccgcgtagagaaaaccggtgtaggtgttgccttccgccgccatgcctttcacggttggccagataatacgttccatggtgcgctgatgaacgtcatcggttactaccggcgcgggggagtaagcgcccatcccgccggtgtttggtccggtatctttatcgcctacgcgtttgtgatcctggctggtagccatcggcagcacatgctcgccgtccaccatcacgataaagctcgcttcttcgccatcgaggaactcttcgataacgatgcgatgacccgcgtcgccaaaagcgttgcccgccagcatatcgtgaacagccgcttccgcttcttccagcgtcatcgccacgataacgcctttcccggcagccagaccgtccgctttaatgacgattggcgcgcctttctcacgcagatacgccagcgcaggttctacctcggtgaagttctggtattccgccgtagggatcttatggcgggccaggaaatctttggtaaacgctttactgccttccagttgggccgcacctgcggttgggtcgaagattttcagcccggcggcgcggaaggtatcgaccacgcctttcaccagcggcgcttccgggccgacgatggtcagatcaatcttttcgttttgtgcgaaatccaacagcgccgggatatcggtcacgccaatagcaacgttttgcagcgcgggttccagtgcagtgcctgcattacccggagcaacaaaaacagtctcaaccagcgggctctgggccgctttccaggccagcgcgtgctcgcgcccgccgttaccaatcactaatactttcatctattgctccattaatggcggaagtggcgcatgtcggtgaagagcatcgcaataccgtgctcgtcggcggcggcaatcacttcgtcatcacggatagaaccgccaggctggattacgcaggtcacgcccgcagcggcggcggcatcaataccgtcgcggaacgggaagaacgcgtcagaagccatgctggaacctttcacttccaggccttcatcggccgctttaataccggcgatttttgcggagtacacgcggctcatctggcccgcgccaatgccgatagtcatattgtttttggcatagacgatagcgttggatttcacaaacttcgccaccttccagcagaacagcgcatcacgcagttcctgttcgctcggctgacgtttggtcaccacgcgcagttcttccgcaccgaccatccccaggtcacgatcctgaaccagcagaccgccgttcacgcgtttgaaatcgaggcccggaacacgctcgccccactgaccgcaggtcagaacgcgtacgttctgtttggcggcggtgattttcagggcttcttcgctggcggacggcgcaataatcacttcgacaaactgacgagaaatgatggcctgtgcggtttccgcatccagctcgcggttaaaggcaatgatgccgccgaatgcggaggttgggtcggttttgtacgcgcgatcgtaagcatcaagaatggaattgccgatagccacgccgcaagggttggcgtgcttcacaatcacacatgccggctcggcgaactctttcacgcactccagcgccgcatcggtatcggcgatgttgttataagagagggctttaccctgaacctgggttgcggtagcaacggaggcttctttcacattctcttctatatagaaggcagcctgctggtggctgttctcgccgtaacgcatatccagcttcttaatgaagttcaggttcagcgtgcgtgggaagcgaccggcggcttctttgctttcaccgtggtaagccggaaccatgctgccgaagtagttggcaatcatgctgtcgtaggcggcagtgtgttcgaaggctttgatggcgaggtcgaaacgggttgcaagcgtcaggcttccttcgttgtcatccatctctttaataatggcgtcatagtcgctgctcttcaccacgattgcgacatctttatggttcttggcggcggagcgcaccatcgttgggccgccgatatcgatgttctcaaccgcatcttccaggctgcaaccttcacgggccacggtctgggcgaacggatacaggttaacaaccaccatatcgataggctggatctgatgttcttccataatggcatcgtcctggccgcgacggcccagaatgccaccatgtactttcggatgcagggtcttcacgcgtccatccatcatctccgggaaaccggtgtaatcggaaacttcggttaccggcagacctttttctgctaacagacgggcagtgccccctgtagacagcagctccacaccgcgtgcggaaagtgcctgggcgaattcgacgataccggctttgtcagaaacactgagcagagcgcggcggactggacgacgttgttgcatggtaaatcccctggatttgactattacagagagcgttagctgaatttttcgcgaaaaactcagctaacgcccctaacggggcatccttatttttcgcccgcattgtaacgaaaacgtttgcgcaacgctcgcgaatttttctctttcaatggtgatcacaattttgactgtggttaccgtgggcaaaatacagaaattacattgatgattgtggataactctgtgcgtaaaaaggtataaagcgggcttttgctggggaatgcagcagtcagtcatttttctgcaatttttctattgcggcctgcggagaactccctataatgcgcctccatcgacacggcggatgtgaatcacttcacacaaacagccggttcggttgaagagaaaaatcctgaaattcagggttgactctgaaagaggaaagcgtaatatacgccacctcgcgacagtgcgctaaagcgcgtcgcaactgctctttaacaatttatcagacaatctgtgtgggcactcgaagatacggattcttaacgtcgcaagacgaaaaatgaataccaagtctcaagagtgaacacgtaattcattacgaagtttaattctttgagcatcaaacttttaaattgaagagtttgatcatggctcagattgaacgctggcggcaggcctaacacatgcaagtcgaacggtaacaggaagaagcttgcttctttgctgacgagtggcggacgggtgagtaatgtctgggaaactgcctgatggagggggataactactggaaacggtagctaataccgcataacgtcgcaagaccaaagagggggaccttcgggcctcttgccatcggatgtgcccagatgggattagctagtaggtggggtaacggctcacctaggcgacgatccctagctggtctgagaggatgaccagccacactggaactgagacacggtccagactcctacgggaggcagcagtggggaatattgcacaatgggcgcaagcctgatgcagccatgccgcgtgtatgaagaaggccttcgggttgtaaagtactttcagcggggaggaagggagtaaagttaatacctttgctcattgacgttacccgcagaagaagcaccggctaactccgtgccagcagccgcggtaatacggagggtgcaagcgttaatcggaattactgggcgtaaagcgcacgcaggcggtttgttaagtcagatgtgaaatccccgggctcaacctgggaactgcatctgatactggcaagcttgagtctcgtagaggggggtagaattccaggtgtagcggtgaaatgcgtagagatctggaggaataccggtggcgaaggcggccccctggacgaagactgacgctcaggtgcgaaagcgtggggagcaaacaggattagataccctggtagtccacgccgtaaacgatgtcgacttggaggttgtgcccttgaggcgtggcttccggagctaacgcgttaagtcgaccgcctggggagtacggccgcaaggttaaaactcaaatgaattgacgggggcccgcacaagcggtggagcatgtggtttaattcgatgcaacgcgaagaaccttacctggtcttgacatccacggaagttttcagagatgagaatgtgccttcgggaaccgtgagacaggtgctgcatggctgtcgtcagctcgtgttgtgaaatgttgggttaagtcccgcaacgagcgcaacccttatcctttgttgccagcggtccggccgggaactcaaaggagactgccagtgataaactggaggaaggtggggatgacgtcaagtcatcatggcccttacgaccagggctacacacgtgctacaatggcgcatacaaagagaagcgacctcgcgagagcaagcggacctcataaagtgcgtcgtagtccggattggagtctgcaactcgactccatgaagtcggaatcgctagtaatcgtggatcagaatgccacggtgaatacgttcccgggccttgtacacaccgcccgtcacaccatgggagtgggttgcaaaagaagtaggtagcttaaccttcgggagggcgcttaccactttgtgattcatgactggggtgaagtcgtaacaaggtaaccgtaggggaacctgcggttggatcacctccttaccttaaagaagcgttctttgcagtgctcacacagattgtctgatagaaagtgaaaagcaaggcgtcttgcgaagcagactgatacgtccccttcgtctagaggcccaggacaccgccctttcacggcggtaacaggggttcgaatcccctaggggacgccacttgctggtttgtgagtgaaagtcacctgccttaatatctcaaaactcatcttcgggtgatgtttgagatatttgctctttaaaaatctggatcaagctgaaaattgaaacactgaacaacgaaagttgttcgtgagtctctcaaattttcgcaacacgatgatgaatcgtaagaaacatcttcgggttgtgaggttaagcgactaagcgtacacggtggatgccctggcagtcagaggcgatgaaggacgtgctaatctgcgataagcgtcggtaaggtgatatgaaccgttataaccggcgatttccgaatggggaaacccagtgtgtttcgacacactatcattaactgaatccataggttaatgaggcgaaccgggggaactgaaacatctaagtaccccgaggaaaagaaatcaaccgagattcccccagtagcggcgagcgaacggggagcagcccagagcctgaatcagtgtgtgtgttagtggaagcgtctggaaaggcgcgcgatacagggtgacagccccgtacacaaaaatgcacatgctgtgagctcgatgagtagggcgggacacgtggtatcctgtctgaatatggggggaccatcctccaaggctaaatactcctgactgaccgatagtgaaccagtaccgtgagggaaaggcgaaaagaaccccggcgaggggagtgaaaaagaacctgaaaccgtgtacgtacaagcagtgggagcacgcttaggcgtgtgactgcgtaccttttgtataatgggtcagcgacttatattctgtagcaaggttaaccgaataggggagccgaagggaaaccgagtcttaactgggcgttaagttgcagggtatagacccgaaacccggtgatctagccatgggcaggttgaaggttgggtaacactaactggaggaccgaaccgactaatgttgaaaaattagcggatgacttgtggctgggggtgaaaggccaatcaaaccgggagatagctggttctccccgaaagctatttaggtagcgcctcgtgaattcatctccgggggtagagcactgtttcggcaagggggtcatcccgacttaccaacccgatgcaaactgcgaataccggagaatgttatcacgggagacacacggcgggtgctaacgtccgtcgtgaagagggaaacaacccagaccgccagctaaggtcccaaagtcatggttaagtgggaaacgatgtgggaaggcccagacagccaggatgttggcttagaagcagccatcatttaaagaaagcgtaatagctcactggtcgagtcggcctgcgcggaagatgtaacggggctaaaccatgcaccgaagctgcggcagcgacgcttatgcgttgttgggtaggggagcgttctgtaagcctgcgaaggtgtgctgtgaggcatgctggaggtatcagaagtgcgaatgctgacataagtaacgataaagcgggtgaaaagcccgctcgccggaagaccaagggttcctgtccaacgttaatcggggcagggtgagtcgacccctaaggcgaggccgaaaggcgtagtcgatgggaaacaggttaatattcctgtacttggtgttactgcgaaggggggacggagaaggctatgttggccgggcgacggttgtcccggtttaagcgtgtaggctggttttccaggcaaatccggaaaatcaaggctgaggcgtgatgacgaggcactacggtgctgaagcaacaaatgccctgcttccaggaaaagcctctaagcatcaggtaacatcaaatcgtaccccaaaccgacacaggtggtcaggtagagaataccaaggcgcttgagagaactcgggtgaaggaactaggcaaaatggtgccgtaacttcgggagaaggcacgctgatatgtaggtgaggtccctcgcggatggagctgaaatcagtcgaagataccagctggctgcaactgtttattaaaaacacagcactgtgcaaacacgaaagtggacgtatacggtgtgacgcctgcccggtgccggaaggttaattgatggggttagcgcaagcgaagctcttgatcgaagccccggtaaacggcggccgtaactataacggtcctaaggtagcgaaattccttgtcgggtaagttccgacctgcacgaatggcgtaatgatggccaggctgtctccacccgagactcagtgaaattgaactcgctgtgaagatgcagtgtacccgcggcaagacggaaagaccccgtgaacctttactatagcttgacactgaacattgagccttgatgtgtaggataggtgggaggctttgaagtgtggacgccagtctgcatggagccgaccttgaaataccaccctttaatgtttgatgttctaacgttgacccgtaatccgggttgcggacagtgtctggtgggtagtttgactggggcggtctcctcctaaagagtaacggaggagcacgaaggttggctaatcctggtcggacatcaggaggttagtgcaatggcataagccagcttgactgcgagcgtgacggcgcgagcaggtgcgaaagcaggtcatagtgatccggtggttctgaatggaagggccatcgctcaacggataaaaggtactccggggataacaggctgataccgcccaagagttcatatcgacggcggtgtttggcacctcgatgtcggctcatcacatcctggggctgaagtaggtcccaagggtatggctgttcgccatttaaagtggtacgcgagctgggtttagaacgtcgtgagacagttcggtccctatctgccgtgggcgctggagaactgaggggggctgctcctagtacgagaggaccggagtggacgcatcactggtgttcgggttgtcatgccaatggcactgcccggtagctaaatgcggaagagataagtgctgaaagcatctaagcacgaaacttgccccgagatgagttctccctgactccttgagagtcctgaaggaacgttgaagacgacgacgttgataggccgggtgtgtaagcgcagcgatgcgttgagctaaccggtactaatgaaccgtgaggcttaaccttacaacgccgaaggtgttttggcggattgagagaagattttcagcctgatacagattaaatcagaacgcagaagcggtctgataaaacagaatttgcctggcggcagtagcgcggtggtcccacctgaccccatgccgaactcagaagtgaaacgccgtagcgccgatggtagtgtggggtctccccatgcgagagtagggaactgccaggcatcaaattagaaaaaccccggtccataaggccggggttttttgcatatcaattatttgcatgatgaagggaatctcatgagtgttctgtatatccaaattcgtcgtaatcaaattactgttcgcgatcttgaaagcaaacgtgaagtgagtggagacgctgccttcagtaaccagcgcctgttaatcgccaatttctttgttgcagaaaaagttctgcaagatcttgttctgcaactccacccacgtagtacctggcattcttttttgccagcaaaacgtatggatattgttgtgagcgcactggaaatgaatgagggcggtttgagtcaggttgaggaacgcattctccatgaagtggtcgctggggcaacgttaatgaaatatcgccagttccacatccatgcgcaaagtgcggtactcagtgatagtgcggtcatggcaatgcttaagcagaaataatcgtgtcaccattggtgggtactaaacctgaagttcagcccaccgggatgagaaaaaatcgcttacgcccccacatacgccagattcagcaacggatacggtttccccaaatcgtccacctcagagcgtcccgtaaccttaaaacccaccttcttatagaacccaaccgcctgctcattttgctcattaacgttggttgtcagttccggtgccatgctgagcgcatgctccaccagcacccgacctacgccgcagccgcgcacatcaggatcgataaacagcgcatccatatgctgcccacttagcaacataaatccaaccggctgatcccgctcattaaccgcgacccacaacggcgcttccggcaggaaggaacgaactaggtcctccagctcggtccgatactctgcacttagaaaatcgtgagtggcatcgacagaacgacaccaaatcgcaacgagttcctccccttcctcatgccgactgcggcgaatactaataaccattttctctccttttagtcattcttatattctaacgtagtcttttccttgaaactttctcaccttcaacatgcaggctcgacattggcaaattttctggttatcttcagctatctggatgtctaaacgtataagcgtatgtagtgaggtaatcaggttatgccgattcgtgtgccggacgagctacccgccgtcaatttcttgcgtgaagaaaacgtctttgtgatgacaacttctcgtgcgtctggtcaggaaattcgtccacttaaggttctgatccttaacctgatgccgaagaagattgaaactgaaaatcagtttctgcgcctgcttagtaacagtcctttgcaggtcgatattcagctgttgcgcatcgattcccgtgaaagccgcaacacgcccgcagagcatctgaacaacttctactgtaactttgaagatattcaggatcagaactttgacggtttgattgtaactggtgcgccgctgggcctggtggagtttaatgatgtcgcttactggccgcagatcaaacaggtgctggagtggagcaaagatcacgtcaccagcacgctgtttgtctgctgggcggtacaggccgcgctcaatatcctctacggcattcctaagcaaactcgcaccgaaaaactctctggcgtttacgagcatcatattctccatcctcatgcgcttctgacgcgtggctttgatgatagtttcctggcaccgcatagccgctatgctgactttccggcagcgttgattcgtgattacaccgatctggaaattctggcagagacggaagaaggggatgcatatctgtttgccagtaaagataagcgcattgcctttatgacgggccatcccgaatatgatgcgcaaacgctggcgcaggaatttttccgcgatgtggaagccggactagacccggatgtaccgtataactatttcccgcacaatgatccgcaaaatacaccgcgagcgagctggcgtagtcacggtaatttactgtttaccaactggctcaactattacgtctaccagatcacgccatacgatctacggcacatgaatccaacgctggattaatcttctgtgatagtcgatcgttaagcgattcagcaccttacctcaggcaccttcgggtgccttttttatttccgaaacgtacctcagcaggtgaataaattttattcatattgttatcaacaagttatcaagtatttttaattaaaatggaaattgtttttgattttgcattttaaatgagtagtcttagttgtgctgaacgaaaagagcacaacgatccttcgttcacagtggggaagttttcggatccatgacgaggagctgcacgatgactgaacaggcaacaacaaccgatgaactggctttcacaaggccgtatggcgagcaggagaagcaaattcttactgccgaagcggtagaatttctgactgagctggtgacgcattttacgccacaacgcaataaacttctggcagcgcgcattcagcagcagcaagatattgataacggaacgttgcctgattttattagcgaaacagcttccattcgcgatgctgattggaaaattcgcgggattcctgcggacttagaagaccgccgcgtagagataactggcccggtagagcgcaagatggtgatcaacgcgctcaacgccaatgtgaaagtctttatggccgatttcgaagatagtctggcaccagactggaacaaagtgatcgacgggcaaattaacctgcgtgatgcggttaacggcaccatcagttacaccaatgaagcaggcaaaatttaccagctcaagcccaatccagcggttttgatttgtcgggtacgcggtctgcacttgccggaaaaacatgtcacctggcgtggtgaggcaatccccggcagcctgtttgattttgcgctctatttcttccacaactatcaggcactgttggcaaagggcagtggtccctatttctatctgccgaaaacccagtcctggcaggaagcggcctggtggagcgaagtcttcagctatgcagaagatcgctttaatctgccgcgcggcaccatcaaggcgacgttgctgattgaaacgctgcccgccgtgttccagatggatgaaatccttcacgcgctgcgtgaccatattgttggtctgaactgcggtcgttgggattacatcttcagctatatcaaaacgttgaaaaactatcccgatcgcgtcctgccagacagacaggcagtgacgatggataaaccattcctgaatgcttacagtcgcctgttgattaaaacctgccataaacgcggtgcttttgcgatgggcggcatggcggcgtttattccgagcaaagatgaagagcacaataaccaggtgctcaacaaagtaaaagcggataaaagcctggaagccaataacggtcacgatggcacatggatcgctcacccaggccttgcggacacggcaatggcggtattcaacgacattctcggctcccgtaaaaatcagcttgaagtgatgcgcgaacaagacgcgccgattactgccgatcagctgctggcaccttgtgatggtgaacgcaccgaagaaggtatgcgcgccaacattcgcgtggctgtgcagtacatcgaagcgtggatctctggcaacggctgtgtgccgatttatggcctgatggaagatgcggcgacggctgaaatttcccgtaccagcatctggcagtggatccatcatcaaaaaacgttgagcaatggcaaaccggtgaccaaagccttgttccgccagatgctgggcgaagagatgaaagtcattgccagcgaactgggcgaagaacgtttctcccaggggcgttttgacgatgccgcacgcttgatggaacagatcaccacttccgatgagttaattgatttcctgaccctgccaggctaccgcctgttagcgtaaaccaccacataactatggagcatctgcacatgaaaacccgtacacaacaaattgaagaattacagaaagagtggactcaaccgcgttgggaaggcattactcgcccatacagtgcggaagatgtggtgaaattacgcggtagtgtcaatcctgaatgcacgctggcgcaactgggcgcagcgaaaatgtggcgtctgctgcacggtgagagcaaaaaaggctacatcaacagcctcggcgcactgactggcggtcaggcgctgcaacaggcgaaagcgggtattgaagcagtctatctgagcggatggcaggtagcggcggacgctaacctggcggccagcatgtatccggatcagagcctctatccggcaaacagcgtgccagctgtggtggagcggatcaacaacaccttccgtcgtgccgatcagatccaatggtccgcgggcattgagccgggcgatccgcgctatgtcgattacttcctgccgatcgttgccgatgcggaagccggttttggcggtgtcctgaatgcctttgaactgatgaaagcgatgattgaagccggtgcagcggcagttcacttcgaagatcagctggcgagtgtgaagaaatgcggtcacatgggcggcaaagttttagtgccaactcaggaagctattcagaaactggtcgcggcgcgtctggcagctgacgtgacgggcgttccaaccctgctggttgcccgtaccgatgctgatgcggcggatctgatcacctccgattgcgacccgtatgacagcgaatttattaccggcgagcgtaccagtgaaggcttcttccgtactcatgcgggcattgagcaagcgatcagccgtggcctggcgtatgcgccatatgctgacctggtctggtgtgaaacctccacgccggatctggaactggcgcgtcgctttgcacaagctatccacgcgaaatatccgggcaaactgctggcttataactgcagcccgagcttcaactggcagaaaaacctcgacgacaaaactattgccagcttccagcagcagctgagcgatatgggctacaagttccagttcatcaccctggcaggtatccacagcatgtggttcaacatgtttgacctggcaaacgcctatgcccagggcgagggtatgaagcactacgttgagaaagtgcagcagccggaatttgccgccgcgaaagatggctataccttcgtatctcaccagcaggaagtgggtacaggttacttcgataaagtgacgactattattcagggcggcacgtctagtgtcaccgcgctgaccggctccactgaagaaagccagttctaagcaacaacaaccgttgctgactgtaggccggataaggcgttcacgccgcatccggcaatcggtgcacgatgcctgatgcgacgcttgcgcgtcttatcatgcctacagccgttgccgaacgtaggctggataaggcgtttacgccgcatccggcaattctctgctcctgatgagggcgctaaatgccgcgtggcctggaattattgattgctcaaaccattttgcaaggcttcgatgctcagtatggtcgattcctcgaagtgacctccggtgcgcagcagcgtttcgaacaggccgactggcatgctgtccagcaggcgatgaaaaaccgtatccatctttacgatcatcacgttggtctggtcgtggagcaactgcgctgcattactaacgaccaaagtacggacgcggcatttttactacgtgttaaagagcattacacccggctgttgccggattacccgcgcttcgagattgcggagagcttttttaactccgtgtactgtcggttatttgaccaccgcagccttactcccgagcggctttttatctttagctctcagccagagcgccgctttcgtaccattccccgcccgctggcgaaagactttcaccccgatcacggctgggaatctctactgatgcgcgttatcagcgacctaccgctgcgcctgcgctggcagaataaaagccgtgacatccattacattattcgccatctgacggaaacgctggggacagacaacctcgcggaaagtcatttacaggtggcgaacgaactgttttaccgcaataaagccgcctggctggtaggcaaactgatcacaccttccggcacattgccatttttgctgccgatccaccagacggacgacggcgagttatttattgatacctgcctgacgacgaccgccgaagcgagcattgtttttggctttgcgcgttcttattttatggtttatgcgccgctgcccgcagcgctggtcgagtggctacgggaaattctgccaggtaaaaccaccgctgaattgtatatggctatcggctgccagaagcacgccaaaaccgaaagctaccgcgaatatctcgtttatctacagggctgtaatgagcagttcattgaagcgccgggtattcgtggaatggtgatgttggtgtttacgctgccgggctttgatcgggtattcaaagtcatcaaagacaggttcgcgccgcagaaagagatgtctgccgctcacgttcgtgcctgctatcaactggtgaaagagcacgatcgcgtgggccgaatggcggacacccaggagtttgaaaactttgtgctggagaagcggcatatttccccggcattaatggaattactgcttcaggaagcagcggaaaaaatcaccgatctcggcgaacaaattgtgattcgccatctttatattgagcggcggatggtgccgctcaatatctggctggaacaagtggaaggtcagcagttgcgcgacgccattgaagaatacggtaacgctattcgccagcttgccgctgctaacattttccctggcgacatgctgtttaaaaacttcggtgtcacccgtcacgggcgtgtggttttttatgattacgatgaaatttgctacatgacggaagtgaatttccgcgacatcccgccgccgcgctatccggaagacgaacttgccagcgaaccgtggtacagcgtcagcccgggcgatgttttcccggaagagtttcgccactggctatgcgccgacccgcgtattggtccgctgtttgaagagatgcacgccgacctgttccgcgctgattactggcgcgcactacaaaaccgcatacgtgaagggcatgtggaagatgtttatgcgtatcggcgcaggcaaagatttagcgtacggtatggggagatgcttttttgagtaaagcttccatataatttttctccgcaatgtatcgagggttatccgtaaagccaaagctttcagccatcttatttaatgtattaaggattaattcagcaataacccggtgaccaaattcaaaagccaactcaaaggcagagtatttttgtggggctttgtgttgccaaaaatccataatatcttcagcggtaaatccaaacaggcgtgcatggtcagataaagcaagataaaccgtctctacaacattttgttgtttatgctgtatcgcactaaacaaaccgggatattcattagaattatttgccaggaggaggggcttcatattttttttatcgaatttaaacgtattaaacagagtgggtaatgcgttaaaaatagtattaataacgttcatgtgtccgcgctgcatggccataaacaaacccgtgtcgcgcgcaagacttttagcggtcagaagatctacaatatcggaagcactaatgttaatttcctgggctaggctgggcaatgcttcaagaataactttcacgatatcgctatgtccattttgcatcgccagatatagtcctgggcaaccataaaaatcctttgccttcaggagatcgagtacctgttctttagtcaaatgacatgtgcgaattaacaaaggtaacgcgttcaaaacaattttcagcatgtcggcatcaccattcgccataacatggtataaaacatggctggacgttctatttttggcactcaggaatttatacacttgttcgttatctaaatgatgtgttgcggccagtttaggtaaggcgttcagaatgctggttacaacatttttatccttacgacttatcgctaaaaataatccagaaaaaccatttttatcttttgcctccagaatatgcatgagattttttttgctgagtaatccttcatatcctgtttcactcaaactattgaaaatagtctcaacgatatccgcattaccataatttatagccaaatataaacctggcaggttaatactattataggcagtcaacatttctgttctatgtagttctggcattttctggagttgaatcatcagttgcgtaagttggtgattctgaccaattgccattagcaaattcatcgttgcaggacttaatggaggggttatttcatccacagatccttttaacatcaatagctgttctttcggaagtgctggaattattgcaacagattgattaataacatgatcattactccatttcaggaggctataatctacattcataaaatccatcagagaatagtgtttaatattctctttgctttcgctcataattcttattttatcgttagttacattaggatcataaacgctaaccacgtaatgggtacatccttcagttgtgttctttattcttagccggaccgtcaaagcatggttatccaccagtaatatggctgccataacactgatgccattactttccatcttgtcaaaatatgctttcataactagcccgaaatcaccgcaggcagcaacgcaacgcccctcaggacggctggaaaccaacgccaaagtctggtttttgcattttttgttgaagtgcgtgagaaatttttcagcactagagtaatcatcttgatggggtttgtaatcaacattctgataaatatcattaatatattgtgcagcaatgtgtcggcatactatacggttttggggtcgccccggaaaataacattgaccattaagtttaattcttgggaattctttttcttttctatcactttttaggtttaattcttgtttatcaagagtgtcactgcgttgaggtaaaatttccattaggtatttttcaaatattggggcaatggtttgagtaagtgtcgtgttttcgtttttattaattatcgtaatttctttcttatcagcttgtaagacggacgtggaaaatttaatgacaaaatccttgttgctaaagatatgacgaccattttgtctacagttctcactgaagctttttaatagaggcgtcgccagctccttgccagaaaatttatcctcgagttctttataaaacaattcactcagggtttggtgttcatttgtctgggctgtattattaatatttgcagagaaagaactacgaggaatacgagtaatcatttaaatatctcattgtttattgatgtcttgaattttaactatcagaacagtgaaaaaatttaatatgattacaactaaagaaatatcataaatcgctcaatctcataatgcagccgtaaaagtttcggtggaatgagatcttgcgattttgttaataattaagtggtttgatgtttaaaaataatgctgagttaataaaagtgtgtgaagtgtatgacattaagttattttggcgtcaatgcgattaacagacacccttattctattgccactcaggtatgatgggcagaatattgcctctgcccgccagaaaaagtcagcgcattccaccgtacgccagcgtcacttccttcgccgctttaatcaccatcgcgccaaactcggtcacgcggtcatcggtaatacgactaatcggtccggaaatagaaattgcggcaaacggttcacggtgctcatcgaaaatacacgctgcaaggcaacgtagccccagtgcatgttcctcatcgtcaaaactataaccccgtttgcgcgtttgggcgagatcttcttttaaatgcacaggagacaccagcgttgcgtgggtataggcatgtaaccctttgcggtgcagcagcttcgtcacctgttcttcgctcagttgggctaaaaaggctttacccgcaccggaagcgtgcatcggcaatttaccgccgataggcgcggacattcgcatcagatgcgtacactgtacctggtcgataataatcgcttcgtgatcgctttgatcaagcaccgccatattgaccgtttcgccagactcttccattagattgcgcaggatagggtgaacaatcgctaacaaattacggctctggagaaagctgctgccgaccataaaggcatgtgcgccgattgcccaatgtcccagttcgccaacctgacgcacgaaaccctgctgttgcatcgtggttagcaggcggtgggtcgtggaattgggtaacccggcttgttgcgccagttccgtgagtgccacactgccattggattcggcaatccactccagtaatttcaggccacgcgttaaagactgaacctgtccagtcgctggtgcggtggcaacggcgggttttctgccgcgtttcgcgggaatgggtgcgaccatgacagtctcttttttctgtatcgtggaaatcattttcatttttattgttagctaatgcaatagttactgaactgatccgatgagttaatgttgaacaaatctcatgttgcgtggtggtcgcttttaccacagatgcgtttatgccagtatggtttgttgaatttttattaaatctgggttgagcgtgtcgggagcaagtgtgagcagcaaagtggaacaactgcgtgcgcagttaaatgaacgtattctggtgctggacggcggtatgggcaccatgatccagagttatcgactgaacgaagccgattttcgtggtgaacgctttgccgactggccatgcgacctcaaaggcaacaacgacctgctggtactcagtaaaccggaagtgatcgccgctatccacaacgcctactttgaagcgggcgcggatatcatcgaaaccaacaccttcaactccacgaccattgcgatggcggattaccagatggaatccctgagcgcggaaatcaactttgcggcggcgaaactggcgcgagcttgtgctgacgagtggaccgcgcgcacgccagagaaaccgcgctacgttgccggtgttctcggcccgaccaaccgcacggcgtctatttctccggacgtcaacgatccggcatttcgtaatatcacttttgacgggctggtggcggcttatcgagagtccaccaaagcgctggtggaaggtggcgcggatctgatcctgattgaaaccgttttcgacacccttaacgccaaagcggcggtatttgcggtgaaaacggagtttgaagcgctgggcgttgagctgccgattatgatctccggcaccatcaccgacgcctccgggcgcacgctctccgggcagaccaccgaagcattttacaacagtttgcgccacgccgaagctctgacctttggcctgaactgtgcgctggggcccgatgaactgcgccagtacgtgcaggagctgagtcggattgcggaatgctacgtcaccgcgcacccgaacgccgggctacccaacgcctttggtgagtacgatctcgacgccgacacgatggcaaaacagatacgtgaatgggcgcaagcgggttttctcaatatcgtcggcggctgctgtggcaccacgccacaacatattgcagcgatgagtcgtgcagtagaaggattagcgccgcgcaaactgccggaaattcccgtagcctgccgtttgtccggcctggagccgctgaacattggcgaagatagcctgtttgtgaacgtgggtgaacgcaccaacgtcaccggttccgctaagttcaagcgcctgatcaaagaagagaaatacagcgaggcgctggatgtcgcgcgtcaacaggtggaaaacggcgcgcagattatcgatatcaacatggatgaagggatgctcgatgccgaagcggcgatggtgcgttttctcaatctgattgccggtgaaccggatatcgctcgcgtgccgattatgatcgactccagtaaatgggacgtcattgaaaaaggtctgaagtgtatccagggcaaaggcattgttaactctatcagcatgaaagagggcgtcgatgcctttatccatcacgcgaaattgttgcgtcgctacggtgcggcagtggtggtaatggcctttgacgaacagggacaggccgatactcgcgcacggaaaatcgagatttgccgtcgggcgtacaaaatcctcaccgaagaggttggcttcccgccagaagatatcatcttcgacccaaacatcttcgcggtcgcaactggcattgaagagcacaacaactacgcgcaggactttatcggcgcgtgtgaagacatcaaacgcgaactgccgcacgcgctgatttccggcggcgtatctaacgtttctttcagcttccgtggcaacgatccggtgcgcgaagccattcacgcagtgttcctctactacgctattcgcaatggcatggatatggggatcgtcaacgccgggcaactggcgatttacgacgacctacccgctgaactgcgcgacgcggtggaagatgtgattcttaatcgtcgcgacgatggcaccgagcgtttactggagcttgccgagaaatatcgcggcagcaaaaccgacgacaccgccaacgcccagcaggcggagtggcgcagctgggaagtgaataaacgtctggaatacagcctggtcaaaggcattaccgagtttatcgagcaggataccgaagaagcccgccagcaggctacgcgcccgattgaagtgattgaaggcccgttgatggacggcatgaatgtggtcggcgacctgtttggcgaagggaaaatgttcctgccacaggtggtcaaaagcgcgcgcgtcatgaaacaggcggtggcctacctcgaaccgtttattgaagccagcaaagagcagggcaaaaccaacggcaagatggtgatcgccaccgtgaagggcgacgtccacgacatcggtaaaaatatcgttggtgtggtgctgcaatgtaacaactacgaaattgtcgatctcggcgttatggtgcctgcggaaaaaattctccgtaccgctaaagaagtgaatgctgatctgattggccttagcgggcttatcacgccgagcctggacgagatggttaacgtggcgaaagagatggagcgtcagggcttcactattccgttactgattggcggcgcgacgaccagtaaagcgcacacggcggtgaaaatcgagcagaactacagcggcccgacggtgtatgtgcagaatgccagccgtaccgttggtgtggtggcggcgctgctttccgatacccagcgcgatgattttgtcgctcgtacccgcaaggagtacgaaaccgtacgtattcagcacgggcgcaagaaaccgcgcacaccaccggtcacgctggaagcggcgcgcgataacgatttcgcttttgactggcaggcttacacgccgccggtggcgcaccgtctcggcgtgcaggaagtcgaagccagcatcgaaacgctgcgtaattacatcgactggacaccgttctttatgacctggagcctggccgggaagtatccgcgcattctggaagatgaagtggtgggcgttgaggcgcagcggctgtttaaagacgccaacgacatgctggataaattaagcgccgagaaaacgctgaatccgcgtggcgtggtgggcctgttcccggcaaaccgtgtgggcgatgacattgaaatctaccgtgacgaaacgcgtacccatgtgatcaacgtcagccaccatctgcgtcaacagaccgaaaaaacaggcttcgctaactactgtctcgctgacttcgttgcgccgaagctttctggtaaagcagattacatcggcgcatttgccgtgactggcgggctggaagaggacgcactggctgatgcctttgaagcgcagcacgatgattacaacaaaatcatggtgaaagcgcttgccgaccgtttagccgaagcctttgcggagtatctccatgagcgtgtgcgtaaagtctactggggctatgcgccgaacgagaacctcagcaacgaagagctgatccgcgaaaactaccagggcatccgtccggcaccgggctatccggcctgcccggaacatacggaaaaagccaccatctgggagctgctggaagtggaaaaacacactggcatgaaactcacagaatctttcgccatgtggcccggtgcaagcgttagcggttggtacttcagccacccggacagcaagtactacgctgtagcacaaattcagcgcgatcaggttgaagattatgcccgccgtaaaggtatgagcgttaccgaagttgagcgctggctggcaccgaatctggggtatgacgcggactgattcacaaatctgtcacttttccttacaacaaacagggcgctcaatgagtgccctgtctctttattaatatgaaacacttatactggaaacaggctggaataatcttagccggaaaaacgaatgtcaaaaggcacagtaaagatgccagtcagcgtgtttccggtcctttggtcattcaattgcttcaggaacatataacgataaggagaacctgaactcgtgttaacgctgcttcacctgctttctgccgtcgccctgctggtctgggggactcatattgttcgaaccggcgtaatgcgcgtcttcggcgcgcgtttgcgtactgtccttagccggagcgtcgaaaaaaagccgctcgccttttgcgcggggatcggcgttaccgcactggtacagagcagtaatgccaccaccatgctggtgaccagctttgtcgctcaggatctggtagccctcgcaccggctctggtcattgtgctgggtgcagatgtcgggacggcgctaatggcgcgtattctcaccttcgacttatcctggctgagtccgttacttatttttatcggcgtgatttttttcctcggacgcaaacagagtcgcgccgggcaactgggccgcgtcggtattggtcttgggctgattttgctagcgctggagttgattgtgcaggccgtaacgccgatcacccaggcaaacggcgttcaggtgatctttgccagcctgaccggcgatattctgctggatgcgctgattggcgcgatgttcgccattatcagctactccagccttgctgctgtactgctgaccgcgactctgaccgccgcaggcattatctccttccccgtggcgctctgtctggtgattggtgctaacctcggttccggtctgctggcaatgctcaacaacagtgccgccaatgccgcagcccgccgtgtcgcgctgggtagtctgctgtttaagctggtgggtagcctgattatcctgccgtttgtccatttgctggcagagacaatggggaagttgagtttgccaaaagcggaactggtgatctatttccacgtcttctacaaccttgtacgttgcctggtcatgctgccatttgttgacccgatggcacggttttgcaaaacgattattcgcgatgaaccggaactggatacccagctacggcctaaacatctggatgtcagcgcgctggatacgcccacgcttgctctggcgaacgccgcgcgcgaaaccctgcgcattggcgacgccatggaacagatgatggaagggttgaataaagtgatgcacggtgagccacggcaggagaaagagctgcgtaagctggcagatgatatcaacgttctctacaccgccattaagctgtatctggcgcggatgccaaaagaagagctggcggaggaagagagccgccgctgggcagagatcatcgaaatgagcctcaaccttgaacaggcctccgatatcgtcgagcgcatgggcagcgaaattgctgacaaaagtctggcagcacggcgggcatttagccttgatgggttgaaggaactggatgcgctctatgagcaattgctcagtaatttaaagctggcaatgagcgtgttcttctctggcgatgtcaccagcgctcgtcgtttgcgtcgcagcaaacatcgttttcgcattcttaatcgccgctattcccacgcccacgtcgatcgcctgcatcagcaaaacgtgcagagcattgaaaccagtagcctacatttaggcttactgggagatatgcagcgcctgaacagcctgttttgtagcgtggcttacagtgtgctggaacagccggatgaagatgaaggacgggacgagtattaatattgtgaatcctgtaggcctgataagacgcgtcaagcgtcgcatcaggcactatgaacaagatgccggatcatgcatccggcaattcacttaaaaacggtgaccagcttccagcggaaccgcttcttcaccagccttaaacacataagtggtgttcgggccacccagcgtagcgtgacctttactcactgtgatccagttaccttccggtagaccaataatcgtcagttctggcgcgacgaccagcagttcgcgaatacgctgctcacgggtttcacctttatggccttccggcagcgcgttggtgaagtgcgggttgatttgcagcgggaacagatttagcgcatcgaaaccttgcggatcgacaatcggcatatcgttggtggtacgaatagttgggcaagcaaggttagcgcctgcgctccagccaatatacagagcgccacgtttaaccacgtcagtaattggtgccagcagcccgcgctcgcggcactgtttcagcaactggaaagtattcccgccgccgacaatcacgatctcagcattttcaatcgcggcaacgggatcgacaacgctatgaataccggtgacagaaacacccagcggagcgagaaccgcagccgttttcgctgtgtaatcatcccaggtctgcgttacgccagcgaaagggataaacaccgcactgcggcgaccctgcaactgttcagcaattagcggcagtgcatgttccagccaggctttacccggcagcgtgctgttactcaataaaagcagttccattacttctccggttagtaagaaatcacgggaggcatgctaccactgcgaatttaaccacttactgacatggctcacgatgtcgcacattgcttctggaaagtgatttgagcaggtaacgaattcaagccaatggaaataacaaatagttcgctcatgactattttttatcaacccaaaggtacggtatattccgttttttacaggagaatttatgctgcccgacagtagtgtccgtttaaataaatacatcagcgaaagcggaatttgcagtcgccgcgaagcggatcgctatatcgagcaaggcaatgtgttccttaatggcaagcgagccaccattggcgatcaggtgaaacccggcgacgttgtgaaagtaaacggtcagttgattgaacctcgggaagccgaagatttggtacttatcgccctgaacaagcccgttggtattgtaagcaccaccgaagatggcgagcgcgataacattgtcgatttcgttaaccacagcaaacgcgtgttcccgattggccgcctggataaagactcccaggggctgattttcctcaccaatcacggcgatctggtgaataagatcctgcgtgctggcaatgatcatgagaaagagtatctggtgacggtcgataaaccgattaccgaggagtttattcgcggcatgagtgcgggggtgccaatcctcgggacagtgaccaaaaagtgcaaagttaaaaaagaagcgccgtttgtcttccgcattaccctggtgcaggggctgaaccgtcagatccggcgcatgtgcgagcatttcggctatgaagtgaaaaagctggaacgcacgcgcatcatgaacgttagcttaagcggcattccgctgggggaatggcgcgatttaaccgacgatgagttaatcgacctctttaagctcattgaaaattcctcttccgaggtaaaacctaaagcgaaggccaaaccgaaaacagcgggcatcaaacgtccagtcgttaagatggaaaaaacggcggaaaaaggcggtcgcccggcgtccaacggtaagcgttttaccagcccggggcgtaaaaagaaggggcgctgattaacgcctcagactgatgaaaacggcccaaaagtgcccggacagtcccctcgccccttcgggaaaagggttagggtgaggggaaaattgtgttcacactgacgagtgaaaatctcaggcgttgattgtggattagcgcctgccgcgcgtgctcgtatttgcactccagctaaaactcgcttcaggatccggtttataagcctgctttttcttcaactggcgggcttttttcgcttcagcctcacgctcaaccattaatttatcgatgtaatctttcttaatgctgttggtttcggagttggtcaatacgcgaccatgcgcaatccgcgcccgatccagcagtgttttaagttcacgctgctcgcgttcagtcatctctttttgggtaatacgggggagtgccatgatggtgccctcagtgagccagagagttcagtgtacgggaattcgtttgcgagcagaactgataatattcattttgccttctcttaactatttatctctttcgataattaattagagatgcagataaaaaaattaaaggcaattattctccgataaagacgctggttaacagagtacaggctcgtttattgatgagcatagtgacaagaaaatcaatacggcccgaaatatagcttccaggccatacagtatttactcaaacaaattactatgcagtttttgcaccacctgctcggcatcttcgccgggcaccaggaagcacaggttatggctggatgcgccataacaaatcatgcgaatgttgaacggttccagtacgccgaatacctctttgccaacgccgcaggctttactcaggtcattgccaatcaacgcgaccagcgccagaccttcttccacctccacccgacacagtgcggaaagctccatcagcagagattgcgtcagcaacgtatcgccagtggaggtactaccggtggtatcaagggttaatgccacgctcacttcactcgtggtgattaagtctacgctaatattatgccgcgcgaggatgccgaaaacttccgcgaggaaaccgcgagaatgcagcatattcaggctgtgcaaagtgagcagagtctgattgcgacgaagcgccagagcgcggaacagcggcggattttcagttttattgcacaccagcgtaccacctgcgcgtgggtctttgctggagccgacaaagaccgggatatcgctgcgtactgcgggtagcaacgttgccggatgcagtacttttgcaccaaaagttgccatctctgccgcttcggcaaacgcgatttcatcaatgcgttttgctgcggaaactacgcgtggatcggtggtgtagatgcccgggacgtcggtccagatatcaacacgagatgcgtgtaaagcctccgccagcaaggctgccgtataatcgctgcctccacggccaagcgtcgttgtacgacctttattttcgctaccgataaatccctgggtgatcactaagccttcattgagacgtgggagcagctgcagcgcggccagttccgccagcgcggctatatctggctctgcacgaccaaatcggtcgttggtacgcatcactttacgtacatcaaaccactgtgcctgaacatcgcgttcgcgcaggatctcaacaaacagcagggtgctcatcagctcgccgtggctgaccagctcatctgtcagcgccggagacgttgccagcgccgccgcttctgccagaacagtaatgttctccagcagacgttcaatctcttcacggataacgttcgggtaacgcagacgttccagaatggcaaactggatgttgcggatagcgtcgagtttttcgaatcgctcgccaggttccagtccttcagctaaagcgaccagcagattagtgataccagcagaagcgctgaggacaactaaacgcacgttggcatcagaaagcacaatatcagcgctgcggttcatggcgtcaaaatcagctacgctggtaccgccaaatttggagacaacaatttcagacataactacctcgtgtcaggggatccattttcagccttggcacaagggaagagcggaagacgggtgggcgcagagcgatacttcgctactattttcacccagaagtgctccaccacttgcgaaacgcccgactgcgaacgcttctggtgacaacccaggggattcagcccctgtagccgatgatgaacgtggccagccgttcaatcacctcggcgatgcaccccctcaggtgttatcacaggactggctcctccaacaccgttacttgggcaacgcgcctcttctggcctgcgctagcgcaggtagtacatttataaataaagggtgagcggggcggttgtcaacgatggggtcatgcggatttttcatccactcctggcggtcagtagttcagctaataaatgcttcactgcgctaagggtttacactcaacattacgctaacggcactaaaaccatcacatttttctgtgactggcgctacaatcttccaaagtcacaattctcaaaatcagaagagtattgctaatgaaaaacatcaatccaacgcagaccgctgcctggcaggcactacagaaacacttcgatgaaatgaaagacgttacgatcgccgatctttttgctaaagacggcgatcgtttttctaagttctccgcaaccttcgacgatcagatgctggtggattactccaaaaaccgcatcactgaagagacgctggcgaaattacaggatctggcgaaagagtgcgatctggcgggcgcgattaagagcatgttctctggcgagaagatcaaccgcactgaaaaccgcgccgtgctgcacgtagcgctgcgtaaccgtagcaataccccgattttggttgatggcaaagacgtaatgccggaagtcaacgcggtgctggagaagatgaaaaccttcagtgaagcgattatttccggtgagtggaaaggttataccggcaaagcaatcactgacgtagtgaacatcgggatcggcggttctgacctcggcccatacatggtgaccgaagctctgcgtccgtacaaaaaccacctgaacatgcactttgtttctaacgtcgatgggactcacatcgcggaagtgctgaaaaaagtaaacccggaaaccacgctgttcttggtagcatctaaaaccttcaccactcaggaaactatgaccaacgcccatagcgcgcgtgactggttcctgaaagcggcaggtgatgaaaaacacgttgcaaaacactttgcggcgctttccaccaatgccaaagccgttggcgagtttggtattgatactgccaacatgttcgagttctgggactgggttggcggccgttactctttgtggagtgcgattggcctgagcattgttctctccatcggctttgataacttcgttgaactgctttccggcgcacacgcgatggacaagcatttctccaccacgcctgccgagaaaaacctgcctgtactgctggcgctgattggcatctggtacaacaatttctttggtgcggaaactgaagcgattctgccgtatgaccagtatatgcaccgtttcgcggcgtacttccagcagggcaatatggagtccaacggtaagtatgttgaccgtaacggtaacgttgtggattaccagactggcccgattatctggggtgaaccaggcactaacggtcagcacgcgttctaccagctgatccaccagggaaccaaaatggtaccgtgcgatttcatcgctccggctatcacccataacccgctctctgatcatcaccagaaactgctgtctaacttcttcgcccagaccgaagcgctggcgtttggtaaatcccgcgaagtggttgagcaggaatatcgtgatcagggtaaagatccggcaacgcttgactacgtggtgccgttcaaagtattcgaaggtaaccgcccgaccaactccatcctgctgcgtgaaatcactccgttcagcctgggtgcgttgattgcgctgtatgagcacaaaatctttactcagggcgtgatcctgaacatcttcaccttcgaccagtggggcgtggaactgggtaaacagctggcgaaccgtattctgccagagctgaaagatgataaagaaatcagcagccacgatagcagcaccaatggtctgattaaccgctataaagcgtggcgcggttaatcatcgtcgatatgtaggccggataaggcgttcacgccgcatccggcaaccgatgcctgatgcgacgcggtcgcgtcttatcaggcctacaggtcgatgccgatatgtacatcgtattcggcaattaatacatagcacgattgattaaataaccttaataacaatgccgacgttatgtcggcatttttttatcagataaatccccttgtctgtaatttaacggaaatcataccgtgaggttaatcctaaaatagatttttaatcgttgtttatttcggaaaatacgcagattaattgcttttgtttttattttaagtttatgatttttattgttatttaaatataagttgaaacttatatttgatattcattccaattatcctaaaacgccatcgctaattccccgcgccgtaattcgcatgctttagttgtgtatactcgatcccgcccgaaatgtttttgggtaaatctccattcattcaatgaagggaaattgttatgaaaaaagttctgtatggcatttttgccatatctgcgcttgcggcgacttctgcgtgggctgcacctgtacaggtgggcgaagcggcagggagcgcagcaacgagcgttagcgcggggagttcctccgcgaccagcgtcagcaccgtaagcagcgcggtgggtgtcgcgcttgcggcaaccggtggcggtgatggttctaataccgggaccaccacaaccacgaccaccagtacccagtaataaagtatgtatccccaaaataattcgagtcattgcatctgtggctagaagtatgaagggattaaccataaccacactccggtgtggttattctgcccctctggagaagagtcgtgaagcgacctgcactcattcttatctgcctgttattacaggcctgtagtgccacgactaaagagctgggcaatagtctgtgggacagtctgttcggcacgccaggcgtacagctgacggatgatgatattcaaaatatgccctacgccagccagtacatgcagcttaatggcgggccgcagttatttgtggtgctggccttcgctgaagacggacaacaaaaatgggtcactcaggatcaggctactctcgttacccaacatggccgtctggtgaagactctgctcggcggcgacaacctgattgaagtgaataaccttgctgccgacccgctgattaaacccgcacaaatcgttgatggcgcaagctggacgcgcacgatgggctggaccgagtaccagcaggtacgctacgccaccgcacgcagtgtcttcaaatgggatggcaccgataccgtcaaagtcggcagcgatgaaaccccggttcgcgtgctggacgaagaagtctccaccgaccaggcgcgctggcataaccgctattggatcgacagcgaagggcaaattcgccagagcgaacagtatctcggcgcggattattttccggtgaaaaccactctcatcaaggcggcaaaacaatgattaaacaaactattgtcgcgttgcttttgagtgtgggagcgagtagcgtcttcgcggcaggaaccgtcaaggtgttcagcaatggcagcagtgaggccaaaacgctaacgggcgcagagcatttaatcgatctggtaggccaaccgcggctggcaaacagctggtggcccggtgcggtgattagcgaagagctggcaacggcggcagcattgcgtcagcagcaggcgttgctgacacggctggcagaacagggcgcagattccagcgccgacgatgccgctgcgattaacgccttacgccagcaaattcaggcgttgaaagtgacgggcaggcaaaaaatcaatcttgatcccgatatcgtccgcgttgccgaacgcggtaacccgccgttgcagggcaactacacgctgtgggtcggaccaccgccgtccacggtcacgttgttcgggcttatcagccgtcctggcaagcagccattcactccaggtcgcgacgtggcgagctatctctctgaccagagcctgctcagcggtgcggatcgcagctacgcgtgggtggtttacccggacggacgcacgcaaaaagcgccggtggcttactggaacaagcgtcacgtagagccgatgcccggcagcattatttatgttggcctcgcggactccgtctggagtgagacgcctgatgcccttaacgccgacattcttcagactctgacgcagcggatacctcaataatgaaaaaaagacatctgcttagcttactggcgctgggcattagcacagcttgctacggcgaaacatatcctgcgcccattggtccgagccagagcgatttcggtggcgtaggattattacaaacgcccaccgcgcgtatggcacgggaaggggagttgagtctgaactatcgcgataacgatcagtaccgttattacagtgctagtgtgcaactcttcccgtggctggaaacaacgctgcgctacaccgacgtgcgcacccggcagtacagcagcgtcgaagcgttctctggcgatcaaacgtataaagataaagccttcgatctcaaactgcgtttgtgggaagagagttactggctgccgcaagtggcggttggtgcgcgggatatcggcggtacggggctgtttgatgcggaatatcttgttgccagcaaagcctgggggccgttcgattttacgctcggcctgggctgggggtatttgggcaccagcggtaatgtgaaaaatccgctctgtagtgccagtgataaatattgctatcgcgataacagctacaaacaggcgggatctatcgacggtagccagatgttccacggtcctgccagtctgtttggcggcgtggaataccagacgccctggcaaccgctgcgcctgaaactggagtatgaaggcaataattatcagcaggattttgccgggaagctggagcaaaaaagtaagtttaacgtcggtgcgatttatcgcgttaccgattgggccgacgttaaccttagctatgaacgtggcaacacctttatgtttggcgttacgttgcgcaccaactttaacgatctgcgcccgtcttacaacgataacgcccgcccgcaatatcaaccgcagccgcaggatgccattttgcagcatagcgtggtggcgaatcagttaacgctgttgaaatacaatgccggacttgccgatccacagatccaggcgaaaggcgatacgctgtatgttaccggcgagcaggtgaaatatcgtgatagccgcgaagggatcatccgtgcgaatcggatcgtgatgaacgatctgccggatgggatcaaaacgatccgcattacggaaaatcgccttaacatgccgcaggtgacgacggaaaccgatgtcgccagcctgaaaaatcatctcgccggagagccgttgggccacgaaacgacgctggcgcaaaaacgcgtcgagccagtggttccgcagtccaccgagcagggctggtatatcgacaaaagtcgctttgatttccatatcgatccggtgctgaaccagagcgtcggtggcccggaaaacttttacatgtatcagctgggcgtgatgggaacggcagatttgtggctgacggaccatctgctgaccaccggcagcctgtttgcaaatcttgccaacaactacgacaagtttaactacactaatcctccgcaggacagccacttaccgcgcgtgcgtacccatgtgcgcgagtatgtgcagaacgatgtctatgtgaataacctgcaagccaactacttccagcatctgggcaacggcttctacggtcaggtctacggtggttatctcgaaaccatgtttggcggtgcgggggcagaagtgttgtatcgcccgctggacagcaactgggcgtttggtctggatgccaactacgttaaacagcgcgactggcgtagtgcaaaagatatgatgaaattcaccgactacagcgtgaaaaccggacatctgaccgcctactggacgccatctttcgctcaggatgtgttagttaaagccagcgtcgggcagtatctggcaggggataaaggcggcacgctggagatcgccaaacgctttgatagcggcgtggtggtgggtggctatgccacgatcactaatgttagcaaagaggagtacggcgaaggggacttcaccaaaggcgtgtatgtcagcgtaccgttggatctcttcagctctggcccgacacgcagccgtgcggcgattggctggacgccgctgacgcgtgacggtggtcagcaacttgggcgtaagttccagttgtatgacatgaccagcgaccgtagcgtcaatttccgctaagtcatgggaaaggtgccagttttcgcactcactggcaccttcattcttaatggcctgtcgagccatcaggaacgcagttcactcccggtttgcgatctggtgtgtaaaggcgaaaacattctgtcttcctgtccgtcgatatcggttgcaggtctggttgcctgagcgactgggccatcattgggctggagacattgctttgcggtaggtcggctttatcagcagtaccgagcggaccagcataagcaggaagaacagagactgataacatcaaagcagcaaaataaggcttcatttttaccacctttatcaggttacgtttcatttgttccagaggaacattgtcgatttttcgcgcattgctggtggctgggaatcacctgaatgggtgatttttgaattaccggctttggtgcggtttgtcttgccggatgcgccgccaggcgcggcttatccggcctacgggtaggtatatccggctttggtggaggcgcgctccaaatccaggttgaacaaaacatacacaaaaaatatagatctccgtcacatttttgcgttatacaggaagctcgccactgtgaaggaggtactgctatgacgagtctctctcgtccgcgcgtggagtttatctccaccattttgcagaccgtactcaatcttggcctgctgtgcctcggcctgattttggttgtcttcctcggcaaagaaacggtgcatctggctgatgtgctgttcgcgccagaacaaaccagcaaatatgagctggtagaaggactggtggtttactttctctatttcgaatttatcgcgctgattgtgaagtactttcagtccggttttcacttcccgctacgttactttgtctatattgggatcaccgccattgtgcgcttgatcatcgtcgatcataaaagcccactggatgtgttgatctacagcgctgcgatcctgttactggtgatcaccctgtggctgtgtaatagcaaacggctgaagcgggagtaaaaagtcagcacgccgaaatggcgcggcgtgctggacaggaagattacagcgtagcagtttgttgtgttttcttcgtttccggttcccagagcgcttccagctcctcaagggttttacctttggtttccgggacaaatttccacataaacagtgctgccagaacgcccatacaaccgtaaatccagtaggagaaaccgttgtggaaatgggccaccagccaggagtttttgtccatcatcgggaaggtccaggagacgaagtagttcgccagccactgggccgccaccgcgattgccagcgctttaccacgaatagcattcgggaagatttcgctcagcagtacccagcataccggaccccaggacatggcaaaggcggcaacatagaacagcatgctcagtagcgccacaatacccggtgcctgagtgtaaaacgcggtaccgaggctaaacataccgattgccattccgagtgcgccgataatttgcagtggcttacgaccaaatttatccaccgtcataattgccagaacggtgaaggtgaggttgataactccgacaataatggtctgcaacagcgcgatatccgtgctggcccccagcgttttgaacacttccggcgcgtagtacagcaccacattgatgccgacaaattgctggaagatggagagcattacgccgattacaatcacgcccacgccaaacatcagcagacgaccaccggttttgcggccatgatccagggagtgtttaatttcctgtactgcctgagttgcaagcgtgttgcccataattttgcgcaggataccttccgcctgttcttgcttgccgcggctcatcagccagcgaggactttctggcacggtatacagcagcattaagaacagcagtgcagggatacattcgctggcaaacatataacgccagccgtcagtattcagccagctggcatcaccggaacgggcaataaaatagtttacgcagtaaactaaaagttgcccgaaaataatcgcaaactggttaaaagagaccagtttcccgcgaatatgagctggagccagttccgcaatatacattgggctgagcatactggctaaaccaacgccaataccgccaataatgcgataaataacaaattccgggacataacctgccagataaacaggcacagtgttgtccgggtttatagaggtaaaaccaagttctggccaggcagaacctacaccagaaataaaaaacaggacagcagcaatcttaagactatcacgacgaccgaagcggttactgcaataaccaccgagggcaccgccgatgatgcaaccaatcagagcgctggccacgcaaaaccctaacagggagttggcagcggattcacttaagttttgtggagcaacaaagacggtattgagactctcaacagtaccggaaataacggcggtgtcgtagccaaataataaaccacctaatgtagcgactaaggtaatgctaaatatataactggaattatactgggtattcattcagacctgccttagaccattctgatcttttatcagtgcattgatgttggaattgtcaggcagttaaggcaattatcattttttacaatgcgtttacgtaatgtcttttctgtgatcttaattgtgataattatccaaaattgataaaaacaatactattgccgtgactcagagcacgaaagagaattatcgtaagtgggaaaacaaataacgtaaaaataataagctctatgatggaaatattaaccggcgaacgattcagattgcagacgaaagaaaaaaaggcgctccgtggagcgccgaataacagtcacaagttgggataacgtaagttgagggtgcagcggcataacattggcagaacaacatctttaacctttcacaccacctgccgtcaggccgttgaccagccagcgttgagccagcaagaagacgatggtgatcggtaatgcagacatcacggcagcggcggcaaagtcaccccacaggtagttttgcgggttgaggtattgctgcatccccacggccagggtgtagctgtttacgtcacgcagtaacaggctcgcgaccggaacttcagtaatggcagcgataaagctcaggatgaataccaccgccagaatcggtacactcagcggcaacaggacaaggcggaaggcctgccacggtgtcgcaccatccagcgcagcagcttcttccaggctactgtcgatggtttcgaaatagcctttgatggtccagacatgcagcgcaatcccacccagatacgcgaaaattacgccgccgtgagtattcaggccaatgaatggaatgtactcacccagacgatcaaacaacgcatacaacgcgaccagactaagtactgccgggaacatctggaaaatcagcattcctttcagcagcgtcgctttgcctggaaagcgcatacgggcgaaagcgtaggcgcaggtggtggagagcgccacaatgccaatcgcggaaatcccggcgacctttacgctgttccacagccacagcagtaccgggaatggcggtggcgtaatgcgaccatcagcctgttcaacgctaaaacctaacgccagtttccagtgatcccaggagatttgctccgggatcaggctgccggtcgcaaagtttccctgacgcaggctgatagcgacgaccatcagcagcgggaacataatcgctgcgataaaaagtagcagtagcaggtgagtaataaataaacgagctttttggcttttcggttggaccattgccatttttgttatctcccttaatcaaacttcattcgcgtggctttcaggttcactatcgccagcgcacccaccagcaggaagatcagcgtggcaattgctgccgccagaccgaagtcctgacccccgccgccttcaaaagcgatgcggtaggtgtagttaacaagcaggtcggtataaccggctggcgtggtcgtgccaagacgatccgggccgccgttggttaacagttgaatcagcacgaagttgttaaagttaaaggcgaagctggcgatcatcagcggcgtcagcggtttaatcagcagcggcagcgtaatcttaaagaagttctggaacggacctgcgccatccattgcactggcttcatacaaatcgtccggaatcgctttcagcaagcccatgcagaggatcatcatgtacggataacccagccaggtattgacgataattagcatcgtgcgggcggtggtcggatcgctgaaccaggcgggcttcacgccaaacagcgcgctcaacatcatgttgatttcaccgaagctctggttaaacaaccctttgaaaatcaagatactaatgaagcttggcaccgcgtagggcagaatcagcaggacgcgatagaccgctttgccgcgcaacgcttcccactgcaccagacacgccagaaccatgccgaccgccaccgttaaaaagacagtgatcaggctgaacaccacggtccagacgaaaatggcgaggaacggtttctgaatgccttcgtcggtaaagacgcgggtaaagtttttccagccggtggtcacggtgtaaccggggcttagcttttcatcaccccagttgccgtcggcggtaatggactggtaaaagccaatttggttattcggacgatatttcacgccgctctgattattcgtcaacgtgccgtcaccgtcgagtgtgtagagcggctgcgtgccagaaaactggcgcagggagctcatcatcactttgttgccatccggcagaatggcggtaatgtcactcagcgcctgacgattctgggtaatcacgcgcagattcgcgcgttcgccttcgggctgggcggtcgtttctttcagttgcagtttttgctcgccgccaaatttaaaagcgtcggagaggtaatttttgccggtttcgccgtcgctgagcgccagttgccactcatcgcccgccgggtaaagaccaaagttataggttttgcctgcttgccaggagcgatctaacaacacttcctgcgcacgttcaaaagtcagctggttagtgctgctgtagttggtgaaggcaatggcgatggtgcagaccagagggaagaggacgaataatcccattccagccattcccgggtaaacatagcgccaggcgtaggctttacgattggcgaaaatatacagccccgcactactcaatatcagcgtggtaatggcgaacaggtattccccttgtgcgtacattaaaacaacaaggtaacccaccagcaggccgagcagacctagcacactccatttcagcgcgtcgctttgccaccaatgtttctttttaatgacatccatggggttcttcctcattccaggacggataaggctttcacgccttatccgacaacaactgcctgatgcgacgctgacgcgtcttatcaggcctacatacgtttcggttttgtaggccggacaaggcgttcacgccgcatccggcatttcacagcattacttggtgatacgagtctgcgcgtctttcagggcttcatcgacagtctgacgaccgctggcggcgttgatcaccgcagtacgcacggcataccagaaagcggacatctgcgggatgttcggcatgatttcacctttctgggcgttttccatggtggcggcaatacgtggatctttcgccaactcttcctcgtaagacttcagcgctacggcacccagcggtttgtctttattaaccgcttccagaccttcatcagtcagcagatagttttcgaggaactctttcgccagctctttgttcggactggcggcgttaatacctgcgctcagcacgccaacgaacggtttggatggttgacccttgaaggtcggcagtaccgttacaccataattcactttgctggtgtcgatgttggaccatgcccacgggccgttgatggtcatcgctgtttcgcctttattaaaggcagcttctgcgatggagtaatcggtgtctgcattcatgtgtttgtttttaatcaggtcaaccaggaaggtcagacccgctttcgcgccagcgttatccacgcccacgtctttaatgtcgtacttgccgttttcatacttgaacgcataacccccgtcagcagcaatcagcggccaggtgaagtacggttcttgcaggttgaacatcagcgcgctcttacctttcgctttcagttctttatccagcgccgggatctcttcccaggtttttggcgggttcggcagcagatctttgttataaatcaggcttaacgcttcaacagcgatcgggtaagcaatcagcttgccgttgtaacgtacggcatcccaggtaaacggatacagcttgtcctggaacgctttgtccggggtgatttcagccaacaggccagattgagcgtagccaccaaagcggtcgtgtgcccagaagataatgtcagggccatcgccagttgccgcaacctgtgggaatttctcttccagtttatccggatgctcaacggtgactttaattccggtatctttctcgaatttcttaccgacttcagcgagaccgttatagcctttatcgccgttaatccagattaccagtttaccttcttcgattttggcgagagcgctggcggaaaacatcatcgtcgttaatgcggataatgcgaggatgcgtgcacctgtttttattttcataatctatggtccttgttggtgaagtgctcgtgaaaacacctaaacggactctagtttctttatacggcaacctctttccatcctccttgcccctacgccccaccgtcgctttgtgtgatctctgttacagaattggcggtaatgtggagatgcgcacataaaatcgccacgatttttgcaagcaacatcacgaaattccttacatgacctcggtttagttcacagaagccgtgttctcatcctcccgcttcctcccccataaaaaagccagggggtggaggatttaagccatctcctgatgacgcatagtcagcccatcatgaatgttgctgtcgatgacaggttgttacaaagggagaagggcatggcgagcgtacagctgcaaaatgtaacgaaagcctggggcgaggtcgtggtaagcaaagatatcaatctcgatatccatgaaggtgaattcgtggtgtttgtcggaccgtctggctgcggtaaaagcactttactgcgcatgattgccgggcttgagacgatcaccagcggcgacctgttcatcggtgagaaacggatgaatgacactccgccagcagaacgcggcgttggtatggtgtttcagtcttacgcgctctatccccacctgagtgtagcagaaaacatgagttttggcctgaaactggctggcgcaaaaaaagaggtgattaaccaacgcgttaaccaggtggcggaagtgctacaactggcgcatttgctggatcgcaaaccgaaagcgctctccggtggtcagcgtcagcgtgtggcgattggccgtacgctggtggccgagccaagcgtatttttgctcgatgaaccgctctccaacctcgatgctgcactgcgtgtgcaaatgcgtatcgaaatctcccgtctgcataaacgcctgggccgcacaatgatttacgtcacccacgatcaggtcgaagcgatgacgctggccgacaaaatcgtggtgctggacgccggtcgcgtggcgcaggttgggaaaccgctggagctgtaccactatccggcagaccgttttgtcgccggatttatcggtagcccaaagatgaacttcctgccggtaaaagtgaccgccaccgcaatcgatcaagtgcaggtggagctgccgatgccaaatcgtcagcaagtctggctgccagttgaaagccgtgatgtccaggttggagccaatatgagcctgggtattcgcccggaacatctactgccgagtgatatcgctgacgtcatccttgagggtgaagttcaggtcgtcgagcaactcggcaacgaaactcaaatccatatccagatcccttccattcgtcaaaacctggtgtaccgccagaacgacgtggtgttggtagaagaaggtgccacattcgctatcggcctgccgccagagcgttgccatctgttccgtgaggatggcactgcatgtcgtcgactgcataaggagccgggcgtttaagcaccccacaaaacacacaaagcctgtcacaggtgatgtgaaaaaagaaaagcaatgactcaggagatagaatgatgattactctgcgcaaacttcctctggcggttgccgtcgcagcgggcgtaatgtctgctcaggcaatggctgttgatttccacggctatgcacgttccggtattggttggacaggtagcggcggtgaacaacagtgtttccagactaccggtgctcaaagtaaataccgtcttggcaacgaatgtgaaacttatgctgaattaaaattgggtcaggaagtgtggaaagagggcgataagagcttctatttcgacactaacgtggcctattccgtcgcacaacagaatgactgggaagctaccgatccggccttccgtgaagcaaacgtgcagggtaaaaacctgatcgaatggctgccaggctccaccatctgggcaggtaagcgcttctaccaacgtcatgacgttcatatgatcgacttctactactgggatatttctggtcctggtgccggtctggaaaacatcgatgttggcttcggtaaactctctctggcagcaacccgctcctctgaagctggtggttcttcctctttcgccagcaacaatatttatgactataccaacgaaaccgcgaacgacgttttcgatgtgcgtttagcgcagatggaaatcaacccgggcggcacattagaactgggtgtcgactacggtcgtgccaacttgcgtgataactatcgtctggttgatggcgcaagcaaagacggctggttattcactgctgaacatactcagagtgtcctgaagggctttaacaagtttgttgttcagtacgctactgacagcatgaccagccagggtaaagggctgagccagggttctggcgttgcatttgataacgaaaaatttgcctacaatatcaacaacaacggtcacatgctgcgtatcctcgaccacggtgcgatctccatgggcgacaactgggacatgatgtacgtgggtatgtaccaggatatcaactgggataacgacaacggcaccaagtggtggaccgtcggtattcgcccgatgtacaagtggacgccaatcatgagcaccgtgatggaaatcggctacgacaacgtcgaatcccagcgcaccggcgacaagaacaatcagtacaaaattaccctcgcacaacaatggcaggctggcgacagcatctggagtcgcccggctattcgtgtcttcgcaacctacgccaagtgggatgagaaatggggttacgactacaccggtaacgctgataacaacgcgaacttcggcaaagccgttcctgctgatttcaacggcggcagcttcggtcgtggcgacagcgacgagtggaccttcggtgcccagatggaaatctggtggtaatagcaaaacctgggccggataaggcgtttacgccgcattcggcaaccaacgcctgatgcgacgcttgcgcgtcttatcaggcctacaacggctgtcaaatgtaggccggataaggcgtttacgccgcatccggcataaaaacaggttgtcattatctgaaaggggcgaaagcccctctgattatcgggtttagcgcgctattgcctggctaccgctgagctccagattttgaggtgaaaacaatgaaaatgaataaaagtctcatcgtcctctgtttaagtgcagggttactggcaagcgcgcctggaattagccttgccgatgttaactacgtaccgcaaaacaccagcgacgcgccagccattccatctgctgcgctgcaacaactcacctggacaccggtcgatcaatctaaaacccagaccacccaactggcgaccggcggccaacaactgaacgttcccggcatcagtggtccggttgctgcgtacagcgtcccggcaaacattggcgaactgaccctgacgctgaccagcgaagtgaacaaacaaaccagcgtttttgcgccgaacgtgctgattcttgatcagaacatgaccccaagtgccttcttccccagcagttatttcacctaccaggaaccaggcgtgatgagtgcagatcggctggaaggcgttatgcgcctgacaccggcgttggggcagcaaaaactttatgttctggtctttaccacggaaaaagatctccagcagacgacccaactgctcgacccggctaaagcctatgccaagggcgtcggtaacagcatcccggatatccccgatccggttgctcgtcataccaccgatggcttactgaaactgaaagtgaaaacgaactccagctccagcgtgttggtaggacctttatttggttcttccgctccagctccggttacggtaggtaacacggcggcaccagctgtggctgcacccgctccggcaccggtgaagaaaagcgagccgatgctcaacgacacggaaagttattttaataccgcgatcaaaaacgctgtcgcgaaaggtgatgttgataaggcgttaaaactgcttgatgaagctgaacgcctgggaagcacatctgcccgttccacctttatcagcagtgtaaaaggcaaggggtaattacgccccacagtgctgattttgcaacaactggtgcgtctcctggcgcacctttttttatgcttccttcctgggatatgagcgattttttatagtaactcacttcttcttcactaagaatatccattatctcaatgccttatcagagattcttttcctttcgccggtagtgtctggacattcaggctacttttccaggttattttatttctgttatgcagaggttttatgataagtcatatcctaaattctggcggcaataactctttgatgaaacatgatgtggtgcaaggaaataatatagtagatcttgatttactacgtaatttaaatggggtgccaggtttaaacagagataactttatttatatcagcaatattttttcaaatataaaacaacggaacgaaaaaatcatgcaataaatatgtttcgtgaagtctcaatcagtaatgatactataagtgtaaaattctacagaaatgaaaaaaattgaatgcgcttgcaattttctgatggataaagatgcgcaggggtatatcgacctgtctgatttggatttaacaagttgtcattttaaaggtgacgttataagcaaggtgtcttttttaagtagtaatctacaacatgtaacattcgaatgtaaagaaattggggattgcaattttactactgcaatagttgataatgtcatatttagatgtcgacgtttacacaatgtgatttttatcaaagcgagtggtgaatgtgtcgatttcagcaaaaatattcttgatacagttgacttcagccagagtcaacttggtcatagtaattttcgcgaatgtcagattagaaatagtaacttcgataattgttatctttacgctagccacttcaccagagcagagtttctgtctgccaaagaaataagttttattaaaagcaatttgacagctgttatgtttgattatgtgcgaatgagcacagggaattttaaagattgcattacagaacaattggaattaactattgattatagtgatatattttggaatgaagatctcgatggttatatcaataacattataaaaatgattgatacattgccagataatgcaatgatattgaaatccgttctggccgtaaaactggtgatgcaattaaaaatacttaatattgttaataaaaactttattgagaatatgaagaaaatatttagccattgtccttatataaaagatcccattatacgcagttatatccattctgatgaagataacaagttcgatgattttatgcgtcaacatcgattcagtgaggtgaatttcgatacccaacagatgatcgattttattaacagatttaatacgaataaatggctaattgataaaaataacaatttttttatccaacttatcgatcaggccttacgaagtacggatgatatgatcaaagcaaatgtttggcatctttataaagagtggattcgtagtgatgatgttagtcctatatttatagaaactgaagataatttaagaacctttaacacgaatgaattaacacgaaacgataatatctttatcctgttctccagtgtcgatgatgggccagttatggtggtaagctcccagcgcttacatgatatgttgaatcctacaaaagataccaattggaattccacgtatatctacaaatccagacatgagatgttgcctgttaatcttactcaggaaacacttttcagctccaaatctcatggtaaatatgcgcttttccccatttttactgcgagttggcgagctcatcgtataatgaataagggtgtttaagtaaaggaaaacatcaccgttcctggcatcctggacggtgatgcccctacggttgccctcgccagcacgggcatcggtaaagcgtaaggttcaacatcgttttaccacttcatgcgattgttgcgtttttgttgcgtattagatcacttaatttgctttacatctcccgtaaacacttttctgcgatacaatgcctttacgttatgtaacggagagttcggcatgagtcaccccgcgttaacgcaactgcgtgcgctgcgctattgtaaagagatccctgccctggatccgcaactgctcgactggctgttgctggaggattccatgacaaaacgttttgaacagcagggaaaaacggtaagcgtgacgatgatccgcgaagggtttgtcgagcagaatgaaatccccgaagaactgccgctgctgccgaaagagtctcgttactggttacgtgaaattttgttatgtgccgatggtgaaccgtggcttgccggtcgtaccgtcgttcctgtgagtacgttaagcgggccggagctggcgttacaaaaattgggtaaaacgccgttaggacgctatctgttcacaagtagcacattaacccgggactttattgagataggccgtgatgccgggctgtgggggcgacgttcccgcctgcgattaagcggtaaaccgctgttgctaacagaactgtttttaccggcgagtccgttgtactaagaggaaaaaaatatggagtggagtctgacgcagaataagctgctggcgtttcatcgcttaatgcgtacggataagccaattggcgcgttactgctgctctggccaacattatgggcgttgtgggtggcgacaccgggcgttccccagctctggatcctggcggtgtttgtcgcgggtgtctggctgatgcgcgctgccggatgtgtggtgaatgattatgctgaccgcaagtttgatggtcatgttaagcgcacggcgaaccgaccacttcccagcggcgcggtaacagagaaagaggcgcgcgcgctgtttgtcgtgctggtactgattagctttttactggtgctgacgctgaatacgatgaccattctgttgagcattgccgcgctagcgctggcgtgggtgtacccgtttatgaagcggtatacccatctaccgcaagtggtgctgggcgcggcgtttggctggagcattccaatggcttttgccgctgtgagtgagagcgtgccattgagttgctggttaatgttcctcgccaatattctctgggcggtggcttacgacacgcagtatgcgatggttgaccgcgatgatgatgtgaagattggcattaaatccacggcaatcctgttcggccaatacgataaattgattattggtattttgcagattggcgtactggcactgatggcgatcatcggtgagttaaatggcttaggctggggatattactggagtattctggtggctggcgcgctgtttgtttatcaacaaaaactgattgccaaccgcgagcgtgaagcctgctttaaagcatttatgaataataactatgttggtctggtactatttttagggctggcaatgagttactggcatttctgatgatgtaaaaaagccggatgatcatccggctttcttctgggttgcctgatgcgcggcgcttctcaggcctacacaacacatcgcaatttattgaatttgcagattatggaaggccggataaggcgttttcgccgcatccggcaattctctctgattacccttcgccctgcgtcgcactctcaatcgtcaaacgcacgtcacttgtaatcaactccgccagcaactgataaaccttcatcgtttctgccggttcggcatcgccgctatcgctgatatacccttcatcacgcagtgtcagcaccagagaactgaacaccgccttgtcgaagaactccggcgcgttgatgccgtgcagcacggagagacgttgcgcgacggtgcggctctctttctccagcgtaccgcggttgatgctcgggttggcactcaacaaccagaaggtgatggcataacgttgcagcgtttcgcgcgcgcctgcggccagcagctgtagcgtgcgagaatgcgccgggttgatatgcaactcatcatcttgcagggtaatcagcccctgacgttgcatctcatttgccagcgcatcaataacgtccggcaactcgtcgcgatcccagcgcaggaacagctccgctttcagcattgggtaaagcacattgacgtgctccatcaatacgtcgcgggagatgtggcgatgctgggtgacgattgccgccatcaggctaggcagcaccaacatatgcgcaatgttgttgcgatagtaggtcatcagcaccgcttgctcgcgcggcagaatgatgatgtcgccgattgtgtctttctcgacttcaaacttgttcatttgcagcgcgtgatcgataagctcgctggcgctggcactaggaacggtagagtccgtggagtagggcacgttgcgcatcagatccaggtagcagttgagttgctcggttaactgctcgcgggtgagactgcgctgacgacttgccagtagcgcagtacagcacaggttcatggcgtttgccgcgcctgcgttgttaatgcgtaccatcagatcggcagcaatattattgaccgtcggcgttaaccatgccggacgcaccgcttcgatgggatcgatagattcacgccagtcaggtacatgctggttaaggtaggtcatcaacggcattggttcaccgaagttgacgtaaccctgaccgagattacgcagcttgcttaaaccgcgcagcatctgcggcaggctctctttctctttcgtcgcgccgcgcagttctttggcgtaagtacccacttccatgacgtgctcataaccgatatagatcggaatcagcgtaatcggacgcgtgccgccacgcagcatcgcctgaatggtcatgctcagcgtaccagttttcggatccagcaaacgccccgtacgggaacgaccgccttccacgaagtactcgacggaataaccacggctgaacagttcgccgagatactcccggaaaacggtggaataaagtttattgcctttaaacgtacggcgaataaagaacgcccccagacggcggaaaatcggcccggcaggccagaaattcaggttgatcccggcggcgatatgcggcggcaccagcccctggtgatacagcacgtaagaaagcagcaggtagtccatgtgactgcggtggcaaggcacatataccagctcatgaccgtcgtgggccagctggcgaacgcgctcagcgttatggacgttgatgccctggtaaagtcggttccaggtgaagcccagaatacggtcagtcaggcgaatcatctcgtaagagaaattcgccgcaatctcttccatcagtgcaatcgcgttctgctgcgctttttcatgggagatttttttgctgcgcgcttcatcttctaccgctttggcaatggcgcgggaggcgagcagcttattaaacagatcctgacgagcaggcaaacgtgggcctacggcagccagacgttgacgggcaaagtgcatacgcgccacgcgcgccagtttctgagcgatagttttatccgtgccgtgttcatccgccatacggcgcaggctaacactcgggctgaaacgcacaaaactgtcgcgaccgagccacagtacagcgaaaaatttctgtacgccgttaagcatacgcagcggcgggttcacttcgcctttttcacgccccggcgcgcgaccaaacatcacgctcactggcaccatctgcacatccagatttgggttgctacggtgcaaatcgagatagtcgtggaacagcttaatagactcttctttcggcgtgtaataggtgaacacacgcggcccgccgtgaatgaacacatagcgcggcagtagcgtgccgtcgatttccagcggctctaacgggtcaggcaagtcatgtgccagacactgggcgcgcaacgtcagcaaatctgctttgctgttgtacggtaaaacgtacataattggacgagaggtatccagccccagttccggggcaggatctgccggaatagacttgctttttaccaggatgcttaatggtaaattcagtaatttgtagtaaattcgtggccagccggacataaacgatgtaaagcctctggttaataatgcaaatgcgcggcaaggatagcagaaagtcatgggaaattctgtggtatccgctcatgtttcgcgcggcgctacgcaaacccgaatcatcggatttaacggtacactgatattgacgctcataatgtaaaaaggttctttcaatggccaataataccactggattcacccgaattatcaaagctgctggctattcctggaaaggtttacgcgctgcatggatcaacgaagcggcattccgtcaggaaggcgtagcggtattgttggcggtggtcatcgcctgctggctggatgtggacgcgattacccgcgtgctgcttatcagctccgtgatgctggtgatgattgtggaaatcctcaatagcgccatcgaagcagtggttgaccgaattggctctgaataccatgagctttccggacgcgcaaaagatatgggatccgctgcggtgctgattgccattatcgtcgccgtgattacctggtgcattctgttatggagccattttggataacccttccagaattcgataaatctctggtttattgtgcagtttatggttccaaaatcgccttttgctgtatatactcacagcataactgtatatacacccagggggcggaatgaaagcgttaacggccaggcaacaagaggtgtttgatctcatccgtgatcacatcagccagacaggtatgccgccgacgcgtgcggaaatcgcgcagcgtttggggttccgttccccaaacgcggctgaagaacatctgaaggcgctggcacgcaaaggcgttattgaaattgtttccggcgcaagtcgcgggattcgtctgttgcaggaagaggaagaagggttgccgctggtaggtcgtgtggctgccggtgaaccacttctggcgcaacagcatattgaaggtcattatcaggtcgatccttccttattcaagccgaatgctgatttcctgctgcgcgtcagcgggatgagcatgaaagatatcggcattatggatggtgacttgctggcagtgcataaaactcaggatgtacgtaacggtcaggtcgttgtcgcacgtattgatgacgaagttaccgttaagcgcctgaaaaaacagggcaataaagtcgaactgttgccagaaaatagcgagtttaaaccaattgtcgttgaccttcgtcagcagagcttcaccattgaagggctggcggttggggttattcgcaacggcgactggctgtaacatatctctgagaccgcgatgccgcctggcgtcgcggtttgttttagttctctcttcatcaggcttgtctgcatggcattcctcactagttctgataaagcactctggcatctcgccttacccatgattttctccaatatcaccgttccgttgctgggactggtcgatacggcggtaattggtcatcttgatagcccggtttatttgggcggcgtggcggttggtgcaacggcgaccagctttctctttatgctgttgctgtttttacgcatgagcaccaccgggctgactgcgcaggcttatggtgccaaaaatcctcaggcattagcccgtacgctggtgcaaccgttgctgttggcgttgggggctggggcgttaattgcgctgctgcgtacgccgattatcgatctggcgctgcatattgttggcggtagtgaggcagtcctggaacaggcgcggcgctttcttgaaatccgctggttaagcgcaccggcgagcctggcgaatctggtattactcggttggttactcggcgtgcaatatgcccgtgcgccagtaattttgttagtggtcggcaatatcctcaacattgtgctggatgtctggctggtgatggggctgcatatgaacgtgcagggcgcggcgctggcgacggttattgcggaatatgcaacattgctgattggtctgctaatggtgcgtaaaatcctcaaactacgcggaatttccggcgaaatgctgaaaactgcctggcgaggaaacttccgtcgcttgctggcgcttaaccgcgatatcatgctgcgtagcctgttgttgcaactctgtttcggcgcgatcaccgtacttggcgcgcgactggggagtgacattatcgctgttaacgcggttctgatgacgctactcacctttaccgcctatgcgctggatggttttgcctacgcggttgaagcgcactccggtcaggcatacggtgcgcgcgacggtagccagttgctggatgtctggcgggcagcgtgccgccagagcgggatcgtagcgttactgtttagcgtggtttatttgctggctggggaacacatcattgcgttactgacgagcttaacccagattcagcagctggctgaccgctatcttatctggcaggtgattttgccggtggttggcgtctggtgttatctgctggacggcatgtttataggcgcaacgcgtgccaccgaaatgcgtaacagtatggcggtggccgccgcaggttttgcgctgacgctccttacgctgccgtggctgggtaatcatgctttgtggctggcattaaccgtctttctggcgttgcgcgggctttctctggcggctatctggcggcgtcactggcgcaatggtacctggtttgccgcaacgtgacggttaaaaattctgaataaataatcctaagccaaattgctgactacacttaatctcacgttcagaagaaaagtgaacgtactctcattcacaacctaacgatgaggtcttgattatgaataaagatgaagccggcggtaactggaaacagtttaaaggtaaagtgaaagagcaatggggcaaactgaccgatgatgatatgacgatcattgaaggtaaacgtgatcaactggtcggtaaaatccaggaacgttatggttatcagaaagatcaggcagaaaaagaggtcgtggattgggaaacccgcaatgaatatcgctggtaattaatccctcctgcccgacgtgtacaaggatgtacgccctcttaacgcggtttctttttcacctgcacagagtgatcatgctggcactgttcaggatgacgacacgcttccacttctacacatgccgcacagagcccatgtgcttcaatcacattatgccgcagggcaaaccccatttttgccgccagcgtatgcataatgtcttccacgccttctgcacactcttctttcactgcgccgcagcgatcgcaaataaacatggcactcgtatgggtgggctgatcgaacagatgacagagcacataactgttggtggattccaccttatgcacaaaaccttgctcaagcagaaaatccagcgcgcgataaaccgttggcggcttggcttgcggttcagcttcgcgcagtaaatcaagcagatcataagcgctgatagcgccatcctgcagactcatcaggcgcaacacttccaggcgctgtggggtcaggcgcacattacgctgcgcgcagattttttcagcctgcgctaataactcctgcgttgtggtcttttccatcgggcacctcaaagtgggggttaagaatgtccttactttaccatgttccaggaaaaacaccgagaacccttattgttgccgtaatgttgattttctgctttgtaggtaaggtgttatgttgccttgtcgtaccattatcaacacgataataattaataattcatttttaaataaattgcttcaagttaactcgctatttatttaactgggtttaaacgcatacctgtagttcagaaattatgagcgatttttgatagtgaccagatggcaaaagaattataaggaggacacggtacgacaaaaaaggtagatgaatcatgttgaagataatacccggtgcaactggatactttaataaaacactcaatagtaatcaattcgataatgaagatgcaatcaaagataaattagataatagaggtagtatcaaaggtaaattaaataatatatatggtaaatctattgattatgcagcgctgcgtcatcgggatataattattgcaaaaatagatttgtttattcaacgaatcacgcataatttatggcatgcacgtaaaaaaatgtgtttttaattgtgcaaataaatgatctcaaaatgtgggtcaataagtatattgacgattgcactgatgaggatttaaacgatcgtgactttattgcaagtgttgttgaccgggctatttttcatttcgcgattaatagtatatgtaatcctggggataataaagatgcaatgcccattgaacaatgtacttttgatgtagaaactaagaatgaccttccctccacggttcagctattttatgaggaatctaaggataatgaacctttagcgaatatacattttcaagcaataggttctggttttttaacgtttgttaatgcctgccaggaacatgatgacaacagcttaaaattatttgctagcctgttaattagtcttagttattctagtgcctacgcagatttaagtgaaacagtgtatattaatgaaaataatgagagctacctgaaagctcagtttgaaaaattatctcaacgtgatatgaagaagtacctgggagagatgaagcgtctggctgatgggggagaaatgaattttgatggctatctggataagatgagtcatctggtgaatgaaggaacgctcgatcctgatattttaagcaaaatgcgagatgctgcaccacaattaattagcttcgcgaagagctttgacccaaccagtaaggaagagattaaaatacttacagacacttctaaattaatttatgatttgttcggggttaaaagcgagaaataatatgtgaagttcttcgatagtatggaaggcattatataaaaggacccaatatttattgggttcttttttctctatcaatactattagcagggagatatatcaccagagtttaatgtgtgattttttatttatcgtcgaacctggattgtttatcattggccttaacaaagttaacggctaataagattatttccatcacttcgtgagagcttcatgccttgagaggatctcaattttcttttgcaatgagacaggcgcttcctgttgttatggtatagtaccccgctattgagcctcctgaatagtgatgctgaataacataaccccatgatatatcgataaaataatctctacatttgaaaatgcacggtaattctgaaatgcaaaaaatcaaccaaaccagcgcaatgcctgaaaaaactgacgttcactggagtggtcggtttagcgttgcaccaatgctcgactggacggacagacattgccgctatttcttgcgtctgctttcccgcaatacgttgctgtataccgaaatggtgaccacaggggcgattattcacggtaaaggtgattatctggcgtacagtgaagaagaacatccggtagcgttgcaactgggcggtagcgatccggcggcgctggcgcagtgtgcaaagctggcagaagcgcgcggatatgatgagatcaacctgaatgtcggctgcccgtctgaccgggtgcagaacggcatgtttggtgcgtgtctgatgggtaatgcgcagctggttgccgactgcgtgaaagcgatgcgcgatgtggtgagcattccggtgacggtgaaaacgcgtattggcatcgacgaccaggacagctatgaatttctctgcgatttcatcaataccgtttccggcaaaggcgagtgtgagatgttcatcatccacgcacgtaaagcctggcttagcgggttaagcccgaaagaaaaccgtgaaatcccgccgctcgattatccgcgtgtgtatcaactgaagcgtgactttccgcatctgacaatgagcattaacggtggtatcaagagcctggaagaggccaaagcacacctgcaacatatggatggcgtgatggtcgggcgcgaggcgtatcagaatccgggtattctggcggcggtagaccgggagatctttggttccagcgataccgatgccgatccggtggcggtagtgcgcgccatgtatccgtacattgagcgtgaactcagccaggggacgtatctcggccatattacccggcatatgttgggcttgttccagggtattcctggcgcgcggcagtggcggcgttatttaagtgaaaatgcccataaagcgggtgcagacattaatgtgctggaacacgcgctcaaactggtggcggataagcgttaacttttcaccaaaaagtagtcaaattcaccacgccctgcgcaccgtcgcggggcgttttgctgttaaatcaatagattatttttggcatgattcttgtaatgccagcaagagatttcatatttgggagagcatcatgctggaactactttttgtgattggcttttttgtcatgctgatggtcaccggcgttagcttgctgggcattatcgccgcgctggttgtggcgacggccattatgttcctcggcggtatgctggcattgatgattaagttgctgccgtggttactactggcgattgcggtggtgtgggttattaaggcgattaaagcaccaaaagtgccgaaatatcagcgttatgaccgctggcgttactaagggattgtgcggatgatcacaacctaaggttttatccttagaacaaaataggaattaataatcaaatctgtcactattgcgcctctaacagattcatcgtgctgtaccctacatacagccgaactataaaaagaaagggcttcccaggtggaagccctatttcttttatggaatcagcaggctggaaccttgcgtcgcccggctttccagaatctcatgcgcacgctgcgcatccttcagcggatatttctgctgctcggcgacatcgaccttaatcacaccgctggcaatcaaagagaacagttcattactggcctcggttaattcctcccgcgtggtgatatagccttgcagggaagggcgtgtcacatacaagctgcctttttgattgagaatgcctaagttcacaccggtaaccgcaccactactgttgccaaaactgaccattaagccgcggcgttgcaggcaatccaggctccgttcccaggtgtctctgcccacggaatcgtacaccacgcgcactttcttaccgccggtgatctcttttaaccgctcgaccagatcctcttcacgatagttaataacctgccacgcgcccgcttttagcgcgctctgcgctttttgcgcggttcctacggtgccgataagtttcgcgcccagggcttttgcccactggcaggcaattaagccaacgccgccagccgctgcgtggaacaggaactgttcatcgggtttaatttcataggttttgcgcagcagataataaaccgttaagcctttcaggaaggatgccgcagcttgctcaaaagaaattgccgcaggcagaatcgccgctttatccgcaataatgttatgcacagagctgtaagcgcctaacgcgctctgcgcatagactacacgatcgcctgccttaatatgctttacaccactgccgactttactcacgatgcctgctgcttcggtgcctaatccgctgggtaggcttggcggcgggtaaaggccgctgcggatatatgtgtcgataaaattgatgccgatggctttattttcgacctggatttcattctccgccggatcggcaggagtgaactctacggcttgaagtacttccgggccaccgtgcttgtgaaattcaattcgtgttgccatgtgtcctccagaacgtatcgtcagggtctgcttcatatgataaagtttcgacccattctttatctcggtaactccattcactatggcaggaaataaacccttcaacaaacagcaggctgaaccccgcgaacgcgatccacaagttgccgggctgaaagtgcctccgcacagcatcgaagcggagcagagcgtgttgggcggtttaatgctagataacgaacgctgggatgatgtagccgagcgtgtggtagcagacgatttttacacccgcccacaccgtcatatctttactgaaatggcgcgtttgcaggaaagcggtagccctatcgatctgattactcttgcggaaagcctggaacgccaggggcaactcgatagcgtcggtggttttgcttatctggcagagctgagtaaaaatacgccaagtgcggctaacatcagtgcctatgcggacatcgtgcgtgaacgtgccgttgtccgtgagatgatcagcgttgcgaatgagattgccgaagctggttttgatccgcaggggcgtaccagcgaagatctgctggatctggctgaatcccgcgtctttaaaattgccgaaagtcgtgcgaacaaagacgaagggccgaagaacatcgccgatgtgctcgacacaaccgtggcgcgtattgagcagttgtttcagcagccacacgatggcgttaccggggtaaacaccggttatgacgatctcaacaaaaaaaccgctggcttgcagccgagcgatttgatcatcgtcgccgcgcgtccgagcatgggtaaaacaacatttgcgatgaacctcgtcgaaaacgcggcgatgttgcaggataaaccggtacttatcttcagcctggagatgccaagtgaacagatcatgatgcgttctctggcgagcctgagccgcgttgaccagactaaaatccgtaccgggcagctcgatgacgaagactgggcgcgcatttccggcaccatgggtattttgctcgaaaaacgcaatatctatatcgatgactcctccggcctgacgccaacggaagtgcgttcccgcgcacgccgtattgcccgtgaacacggcggcatcgggcttatcatgatcgactacctgcaactgatgcgcgtaccggcgctttccgataaccgtacgctggaaattgcagaaatctctcgcagcctgaaagcactggcgaaagaactgaacgtgccggtggtggcgctgtcccagttgaaccgttctctggaacaacgtgccgacaaacgcccggtcaactccgacctgcgtgaatctggctctatcgagcaggatgcggacttgatcatgtttatctatcgtgatgaggtgtatcacgaaaacagtgatttaaaaggcatcgcggaaattattatcggtaaacaacgtaacggcccaatcgggacggtacgcctgacctttaacggtcaatggagccgcttcgacaactatgcggggccgcagtacgacgacgaataataattattttatgaattaggtaattaaagcaaacacttatcaaggaacacaaatgcaagcggcaactgttgtgattaaccgccgcgctctgcgacacaacctgcaacgtcttcgtgaactggcccctgccagtaaaatggttgcggtggtgaaagcgaacgcttatggtcacggtcttcttgagaccgcgcgaacgctccccgatgctgacgcctttggcgtagcccgtctcgaagaagctctgcgactgcgtgcggggggaatcaccaaacctgtactgttactcgaaggcttttttgatgccagagatctgccgacgatttctgcgcaacattttcataccgccgtgcataacgaagaacagctggctgcgctggaagaggctagcctggacgagccggttaccgtctggatgaaactcgataccggtatgcaccgtctgggcgtaaggccggaacaggctgaggcgttttatcatcgcctgacccagtgcaaaaacgttcgtcagccggtgaatatcgtcagccattttgcgcgcgcggatgaaccaaaatgtggcgcaaccgagaaacaactcgctatctttaataccttttgcgaaggcaaacctggtcaacgttccattgccgcgagcggtggcattctgctgtggccacagagccattttgactgggtgcgcccgggcatcattctttatggcgtcagcccgctggaagatcgctccaccggtgccgattttggctgtcagccagtgatgagtctaacctccagcctgattgccgtgcgtgagcataaagccggagagcctgttggttatggtggaacctgggtaagcgaacgtgatacccgtcttggcgtagtcgcgatgggctatggcgatggttatccgcgcgccgcgccgtccggtacgccagtgctggtgaacggtcgcgaagtaccgattgtcgggcgcgtggcgatggatatgatctgcgtagacttaggtccacaggcgcaggacaaagccggggatccggtcattttatggggcgaaggtttgcccgtagaacgtatcgctgaaatgacgaaagtaagcgcttacgaacttattacgcgcctgactagtagggtcgcgatgaaatacgtggattaatcgttctgtaatatttgattgtctgtgccggatgcggcgtgaatgccttatccggccaataaaatcctaaaaattcaataagttgatgttctttcatgctcttataaaggtcgtgcctctggcggatgtacgtttgtcatgagtctcactctgttgctaattgccgttcgctcctgaacatccactcgatcttcgccttcttccggtttattgtgttttaaccacctgcccgtaaacctggagaaccatcgcgtgtttcaaaaagttgacgcctacgctggcgacccgattcttacgcttatggagcgttttaaagaagaccctcgcagcgacaaagtgaatttaagtatcggtctgtactacaacgaagacggaattattccacaactgcaagccgtggcggaggcggaagcgcgcctgaatgcgcagcctcatggcgctagcctttatttaccgatggaagggcttaactgctatcgccatgccattgcgccgctgctgtttggtgcggaccatccggtactgaaacaacagcgcgtagcaaccattcaaacccttggcggctccggggcattgaaagtgggcgcggatttcctgaaacgctacttcccggaaagtggcgtctgggtcagcgatcctacctgggaaaaccacgtagcaatattcgccggggctggattcgaagtgagtacttacccctggtatgacgaagcgactaacggcgtgcgctttaatgacctgttggcgacgctgaaaacattacctgcccgcagtattgtgttgctgcatccatgttgccacaacccaacgggtgccgatctcactaatgatcagtgggatgcggtgattgaaattctcaaagcccgcgagcttattccattcctcgatattgcctatcaaggatttggtgccggtatggaagaggatgcctacgctattcgcgccattgccagcgctggattacccgctctggtgagcaatagcttcagcaaaattttctccctttacggcgagcgcgtcggcggactttctgttatgtgtgaagatgccgaagccgctggccgcgtactggggcaattgaaagcaacagttcgccgcaactactccagcccgccgaattttggtgcgcaggtggtggctgcagtgctgaatgacgaggcattgaaagccagctggctggcggaagtagaagagatgcgtactcgcattctggcaatgcgtcaggaattggtgaaggtattaagcacagagatgccagaacgcaatttcgattatctgcttaatcagcgcggcatgttcagttataccggtttaagtgccgctcaggttgaccgactacgtgaagaatttggtgtctatctcatcgccagcggtcgcatgtgtgtcgccgggttaaatacggcaaatgtacaacgtgtggcaaaggcgtttgctgcggtgatgtaatgcaggaaagcaggctggagctacccagcctgcagtgaaattaaactgtcgtcgctttcactctttctttatagatgatttttttgatgccatcgttctacgtgagagataataaacgttgttagttcttttattgttaagcttatcccaattatctggaattccttatcctgtttttttgggtggagtaataatttctgcacatctaaccattattaaatttaataataagtatcgggtttgttacgatagaatatttctatatcctcaagaatatgctttgccttattgcctgtgactttctgagattcaattatagtatcgttaaattctaatgttaaagagaactcttttttccgctttgtgtaagtttaaccttatattgattaccaatatcaaataaaaaggtcctgtaatgagaataatcacctttaacctcctcggcaaaacagcaaagcgtgcaaatatacataaagtctttcttacccctgattttgttaactaaatcaataaatgcgtgaaaaactttacttgcaatagaacttgatacttcttctccaggtctaaaaaatcttttgcaatttttaactgtgtttctatgtataaaaagaaatctttggcataagagatatctttattatttagtgcatctagctcaacaggtaaagatgtcgttttgttgctattcacatatgatatattcatatcatcatctccatcgcgagtaataaaattaatcaccattgtagggtagggggctggtcaatcagaaatcatctttataaacttcgattgtttttgtaatgctgtatcattaagttcattaaatcgtacagcagataaatgttctatcaaatttcgctcatttgccgaggattcatcataataaacgtaaaattaatgtatccttacatcgagtaataaacattttttatacaaaaaaagacaggaacgtatttactgggttaaatataatcatcctgcttttcatcacaaaaaccgcagataatccttcctttccccggcagctggcgttatggtcagatggtttttgcaacaaatctcacaataaaaagtttcaacatactgactatttagggaaaaatatgcgcaagatcacacaggcaatcagtgccgtttgcttattgttcgctctaaacagttccgctgttgccctggccagttctcctagtccgcttaaccctgggactaacgttgccaggcttgctgaacaggcacccattcattgggttagcgtcgcacaaattgaaaatagcctcgcagggcgtccgccaatggcggtggggtttgatatcgatgacacggtacttttttccagtccgggcttctggcgcggcaaaaaaaccttcagcccagaaagcgaagattatctgaaaaatcctgtgttctgggaaaaaatgaacaatggctgggatgaattcagcattccaaaagaggtcgctcgccagctgattgatatgcatgtacgccgcggtgacgcgatcttctttgtgactggtcgtagcccgacgaaaacagaaacggttagtaaaacgctggcggataattttcatattcctgccaccaacatgaatccggtgatctttgcgggcgataaaccagggcaaaatacaaaaagccaatggctgcaggataaaaatatccgaattttttatggcgattctgataatgatattaccgccgcacgcgatgtcggcgctcgtggtatccgcattctgcgcgcctccaactctacctacaaacccttgccacaagcgggtgcgtttggtgaagaggtgatcgtcaatagtgaatactgacagagcgggagagcgtgatgctctcccgaatgctgtttttttaatcacacctttatcctttcgctgtcttgctgcaaactgattaagagagttttatcaaggagcagcacatgtggtatcaaaagacgctcacgcttagcgccaaatctcgtgggtttcatctggtaacggatgaaattctgaatcagctggctgatatgccgcgcgttaacatcggcttactgcatctgttgctgcaacatacctccgcctctctgacacttaatgagaactgcgatcccaccgtacgccacgacatggagcgttttttcctccgcaccgttcccgacaacggaaattatgagcatgactatgagggagcagacgatatgccttctcatatcaaatccagtatgctgggaacaagccttgtattgccggtgcataaagggcgtattcagaccggcacctggcaaggcatttggctgggggaacatcgcatccacggcggaagccgtcgcatcatcgcgacactacaaggggagtaaaaaatgaccattagcgagttgctacaatattgcatggcaaaaccaggcgcagaacagagcgtgcataatgactggaaagcgacgcagatcaaagtggaagatgtactgtttgcgatggtgaaagaagtagaaaatcgcccagctgttagcctgaaaaccagcccggagctggcggagctgctacgtcagcagcacagcgatgtgcgtccaagccgccatctgaataaagcgcactggagcaccgtgtatctcgacggtagcctgccagatagccaaatctattatctggtggatgcgtcttatcagcaggcggtgaatttactgccggaagaaaaacgtaaattgctggtgcaactctgaaaggaaaaggccgctcagaaagcggccttaacgattacagcatcggcttaaggaagcgtgccgtgtgacttgcttcgcactccgcgacggtttctggcgtaccggagacgaggatctcgccgccaccactgccgccttctggtcccaggtcgacaatccagtcagcggttttgatcacgtcgagattgtgctcaatcaccacaatggtgttgccctgatcgcgcagtttatgcagtacgtcgagcagttgctgaatatcggcgaagtgcagaccggtggtcggctcgtcgagaatatacagcgtctgcccggtgccgcgtttactcagttcacgcgccagcttcacgcgctgggcttcaccgccactaagggtggttgcggactgccccagtcgaatgtacgtcaggccaacgtccatcaacgtttgcagcttacgcgccagtgcaggtacggcatcaaagaactcacgcgcctcttcgatggtcatatccagcacttcgtggatggttttgcctttgtacttaatctccagcgtttcacggttatagcgtttacctttgcactggtcgcacggcacgtagatatccggcaggaagtgcatctccactttgatcacgccatcgccctgacaggcctcgcagcgtccgccacgaacgttaaagctgaaacgtcccggcgtatagccgcgcgcacgggattccggtacgcccgcaaacagttcgcgcacaggcgtaaacacgccggtataggtcgccgggttagaacgtggagtacgaccaattgggctttggtcgatatcgatcactttatcgaaatgctccagcccctgaatatcgcgatacggtgctggttcggcgatggtcgccccattcaactggcgttgggcaatcgggaacagtgtgtcgttaatcagcgtgcttttaccggaaccactaaccccggtgatgcaggtaaacagacccaccggcagcgtcagcgtcacgtccttcaggttgttgccgcgtgcgcctgtcagcttcagcactttttccggattcgccggaacgcgtttcttcggcacttcaatcttgcgtttgccgctcatgtactgcccggtcaagctctccggcaccgccataatcgcttccagcggaccttctgcgaccacttcaccgccgtgaacacctgcgcccgggccaatgtcgatcacatggtcagcggcgcgaattgcgtcttcgtcgtgctccaccacaatcacggtattaccgagatcgcgcagatggataagcgtacccaacaggcgctcgttatcacgctggtgcaggccgatagacggctcgtccagcacgtacataacgccaaccaggcccgcaccaatctggctcgccagacggatacgctgtgcttcaccgccagaaagcgtttctgcgctgcgggaaagcgtcaggtaattcaggccgacgttaacgaggaatttcagacgatcgccgatctctttaaggattttttctgcaatcttcgcccgctgacctgcgagtttgagattgttgaagaattccatcgcatgaccaatgctcatgtcggagatagcaggcagcggcgtattctcgacatacacgtggcgcgcttcccgacgcagacgcgtcccttcgcagctggcgcacggacgattactgataaacttggctaattcttcgcgtaccgcgctggattccgtctctttatagcggcgctccatattatgcagcacgccttcgaacggatgacgacgaatggaggtatcgccacgatcgttcatgtatttgaattcaatgttttctttgccagaaccgtacaacaccactttatgcacgttcgcgctcaggctgccccacggcgcttcgacgtcgaacttatagtgatctgccaggcttttcagcatctggaaataatagaagttgcggcgatcccagccacggatcgcaccaccagccaggctcagttccggattctggatcactcgatcaggatcgaaatattgctgtacgccaaggccgtcgcaggtcgggcaggcccccgccgggttgttaaagctaaacagtcgcggctccagttcacgcatactgtagccgcaaattgggcaggcgaagttggcggagaacagcagctcttccgctttcgggtcgtccatatccgccactaccgcggtaccaccggaaagctccagcgcggtttcaaaactctcggcaagacgttgggtaagatcgtcacgcaccttgaagcgatcaaccaccacttcaatggtatgtttcttttgcagttccagttttggcggatcggaaagatcgcagacttcgccatcaatacgagcacggatgtagccctggcttgccaggttctccagcgttttggtgtgttcgcctttgcgctctttaatgattggcgcgagtagcatcagacgcttgccttccggctggctcagcacgttatccaccatctggctgacggtttgcgccgccagcgggacgtcgtggtccggacagcgcggctcgccaacgcgggcgaataacaaacgcaaatagtcgtggatttcggtgattgtccccaccgtagaacgcgggttatgagacgtgcttttctgctcaatactgatggcaggagaaagcccctcaatatgatcgacgtccggcttttccatcagactcagaaactgccgcgcgtaggcggaaagggattcaacgtaacggcgctgcccttcggcatataaggtgtcgaaagcgaggctggatttgccagaaccgctaagcccggtcacgacaatgagcttgtcgcgggggataacgaggttgatgtttttgagattatgggtgcgggcgccccgaacttcgatcttatccattcacctttcccggattaaacgcttttttgcccggtggcatggtgctaccggcgatcacaaacggttaattatgacacaaattgacctgaatgaatatacagtattggaatgcattacccggagtgttgtgtaacaatgtctggccaggtttgtttcccggaaccgaggtcacaacatagtaaaagcgctattggtaatggtacaatcgcgcgtttacacttattcagaacgatttttttcaggagacacgaacatggccagcagaggcgtaaacaaggttattctcgttggtaatctgggtcaggacccggaagtacgctacatgccaaatggtggcgcagttgccaacattacgctggctacttccgaatcctggcgtgataaagcgaccggcgagatgaaagaacagactgaatggcaccgcgttgtgctgttcggcaaactggcagaagtggcgagcgaatatctgcgtaaaggttctcaggtttatatcgaaggtcagctgcgtacccgtaaatggaccgatcaatccggtcaggatcgctacaccacagaagtcgtggtgaacgttggcggcaccatgcagatgctgggtggtcgtcagggtggtggcgctccggcaggtggcaatatcggtggtggtcagccgcagggcggttggggtcagcctcagcagccgcagggtggcaatcagttcagcggcggcgcgcagtctcgcccgcagcagtccgctccggcagcgccgtctaacgagccgccgatggactttgatgatgacattccgttctgatttgtcattaaaacaataggttatattgttttaaggtggatgattaaagcatctgccagccataaaaaagaagcctccgttatggaggcttctacgtatcaggtcaaaatcattggccattgtggcggtgtctgattcatctcttctatcatcacgctctcgatgttgtgccagatagcggtgatgtccgccattgtgatgccaagcaaccccattgcgaaccaacaggcggaaacaacgcccagaccgctgctgatcaccgcaagcccgacataatcagaccgacgaaaacggatgttgagtgtgctggccagaaacatcattacggcactaagaagttgccagcgaagaagaaccacgccagtggtgagggtagccatcaaacaattcctctgaaaagagccgatgccctggacagcgcggcgttgttcacgggaggcgtggtacactctggctatcgcggggcttgcagaacacaaaaatgaaacactctgtttgtttcattaattttgtgaactatatcacaattgattgtttgttagccatattaggccgtgacttttattgctgtacagattatgtggtttttcagtggcattaagggcatatcttcccgccgcctctgcattcctgtaggaaattaattttgaatatcaatgaattattttcatccaggtgacgattagaaaggtatcaatttcaaatcaggcaaaagtgctatttataccgtaagatttatctaaagacgtcggtacccagggttttcaccttgcaatggccgggtataaacaggcaggaaattgatagcaatgagtcatcgtgcacgacaccaattactggcgttgccgggcattatctttttagttctctttcccatcattcttagcctatggattgccttcctttgggcaaaaagtgaagtgaataatcagctccgaacctttgctcaactggcactggataaatccgagctggtcattcgccaggcagatttagtgagcgatgcagctgaacgctatcaggggcaagtttgcactccagcccatcaaaagcgaatgttgaatattattcgtggctatctttatattaatgaattgatctatgcccgtgataaccattttttatgcagtagcctgatagcgcctgtaaacggctatacgattgcaccggccgattataagcgtgaacctaacgtttctatctattattaccgcgatacgccttttttctctggctataaaatgacctatatgcagcggggaaattatgtggcggttatcaaccctctcttctggagtgaagtgatgtctgatgacccgacattgcaatggggtgtgtatgatacggtgacgaaaacctttttcagcttaagcaaagaggccagcgcagcaacgttttctccgctgattcatttgaaggatttaaccgtacaaagaaatggctatttatatgcgacagtttatagcacaaaacgcccaattgcagccattgttgcgactagttatcaacgtcttataacccatttttataatcatcttatttttgcgttgcccgccggtattttggggagtcttgttctgctattactctggctacgtattcgacaaaactatttatctcccaaacgtaaattgcaacgcgccctcgaaaaacatcaactttgtctttattaccagccaataatcgatatcaaaacagaaaaatgtatcggcgctgaagcgttgttacgttggcctggtgagcaggggcaaataatgaatccggcagagtttattccgctggcagaaaaggaggggatgatagaacagataactgattatgttattgataatgtcttccgcgatctgggcgattacctggcaacacatgcagatcgctatgtttctattaacctgagcgcctccgattttcatacgagtcggttgatagcgcgaatcaatcagaaaacagagcaatacgcggtgcgtccgcagcaaattaaatttgaagtgactgagcatgcatttcttgatgttgacaaaatgacgccgattattctggctttccgccaggcaggttacgaagtggcaattgatgattttggtattggctactctaacttgcataaccttaaaagtttgaatgtcgatattttgaaaatcgacaaaagctttgttgaaacgctgaccacccacaaaaccagtcatttgattgcggaacacatcatcgagctggcgcacagcctggggttaaaaacgatcgctgaaggcgtcgaaactgaggagcaggttaactggctgcgcaaacgcggcgtgcgctattgccagggatggttctttgcgaaggcgatgccgccgcaggtgtttatgcaatggatggagcaattacccgcgcgggagttaacgcgcgggcaataaaattacaggcggtggcgataatcgctgggagtgcgatcaaactgccgacggaaaacgcgggagaaggtctgctggctgacataacccaggtccattgcgatatcaaaaatcggacgctcggtggtgcgcaactcaacggcggccagtaacaggcggcgttggcgaatgtaatcgccaagcgtctgatgcgtcaccgtgcggaacattcgttgcaagtaccacttactatagccacttttttttgcgactacatcaatgttaagcggctggtcaatatgctcgtcaatccatgcgataagatcctgaataattttctgatgggacataaatctgcctcttttcagtgttcagttcgttaattcatctgttggggagtataattcctcaagttaacttgaggtaaagcgatttatggaaaagaaattaccccgcattaaagcgctgctaacccccggcgaagtggcgaaacgcagcggtgtggcggtaagcgcgctgcatttctatgaaagtaaagggttgattaccagtatccgtaacagcggcaatcagcggcgatataaacgtgatgtgttgcgatatgttgcaattatcaaaattgctcagcgtattggcattccgctggcgaccattggtgaagcgtttggcgtgttgcccgaagggcatacgttaagtgcgaaagagtggaaacagcttagctcccaatggcgagaagagttggatcggcgcattcataccttagtggcgctgcgtgacgaactggacggatgtattggttgtggctgccttagccgcagtgattgcccgttgcgtaacccgggcgaccgcttaggagaagaaggtaccggcgcacgcttgctggaagatgaacaaaactaaagcgccacaagggcgctttagtttgttttccggtctttgtctttctctctatcccgctggtacacaggagggtttcccccgacgtcaacacacctcattcgagcacgtggtggaggttccggttggtgttgatgctttaattgtatgtcaccgacgtttcttcgccagtgtaaaagtatactttttaaccgcaatatttttgtcatctcagacgattttttatcgcaatcctgaacggtatacggctcgataacgctgcaatcttgcgcaccgacgataacgtttgcgcatcaattgcctggtttttcatcgtcaagacaataaaagagaaaaaagcagcaaacttcggttgaaaaagccgctatgatcgccggataatcgtttgctttttttaccacccgttttgtatgcgcggagctaaacgtttgcttttttgcgacgcagcaaattgtcgcaaacctggagcaggaagataacgtttcgctggcaggggattgtccgccacgcatcttgacgaaaattaaactctcaggggatgttttcttatgtctacgccaagtgcgcgtaccggcggtagtctcgacgcctggtttaaaattagtcaacgtggaagcactgtccgtcaggaagtggttgccgggttaacaacgtttctggcgatggtctacagcgtcatcgtcgttccaggtatgttgggtaaagcaggcttcccgcctgcggcagttttcgttgcaacctgtctggttgccggactcggttctatcgtgatgggtctgtgggctaatctgccgttggcgattggttgcgccatctccctgacagcgtttaccgcattcagcctggtgctggggcaacatattagcgtacctgtcgcgctgggtgccgtgttcctgatgggtgtgctgtttacggtaatttctgccacgggtatccgtagctggattttgcgcaacttgcctcacggtgtggcgcacggcacggggattggtatcggtctgttcctgctgctcattgccgctaacggtgtcggtctggtgattaaaaacccgcttgatggtctgcccgttgcgctgggtgatttcgcgaccttcccggtgattatgagtctggtaggtctggcggtgatcatcggcctggaaaaactgaaagtccctggtggcattctgctgaccattatcggtatcagtattgtcggtttgatcttcgatcctaacgtccatttctccggcgttttcgccatgcctagtttgagcgatgaaaacggcaatagtctgattggcagcctggacattatgggcgcgctgaatcctgtagtcctgccaagcgttctggcgctggtgatgacggcagtatttgatgccaccggaactatccgtgccgtcgccggccaggcgaacctgctggataaagatgggcagatcatcgacggtgggaaagcactgaccactgactccatgagcagcgttttctctggcctggtgggtgcggctccggcagcggtatacatcgagtctgcggcgggtacggcggcgggcggtaaaaccggtttgacggctatcaccgttggcgtgctgttcctcctgattctgttcctctctccgctctcttacctcgttccggggtatgcaacggctccggcgctgatgtacgttggcctgctgatgctgagcaacgtggcgaaaatcgactttgctgattttgttgatgcgatggcgggtctggttacggctgtattcatcgtgctgacctgtaacatcgtaacaggcatcatgatcggcttcgcgactctggtgattggtcgtctggtttccggcgaatggcgcaagttgaacatcggtacggtcgttatcgccgtggcgctggtgaccttctatgcgggtggctgggctatctaatctttcatcggattctgaaaacgggtggcaatggctgcccgtttttattttctccgcacattgtgtgagcttttgcgatattctgaaaaaaatgagaattcaggcataacgtctttctcagatcataaaaaacatcgcaaacagggaacgcatggaaatcttcttcaccatactgataatgaccctcgtggtcagcctgtccggggtggtcactcgtgtcatgccctttcagatcccgcttccgcttatgcaaatcgccatcggtgcgctactggcgtggccgacgtttggtttgcatgtggagtttgatcctgaactctttttagtcttgtttatcccgccgttgctgttcgctgatggctggaaaacgccgacccgtgaatttctcgaacatggtcgagagattttcggcctcgcgctggcgctggtggtggtcaccgtggtcggcattggcttccttatttactgggtggtgccgggcattccgctgatccctgcctttgcgctggcggcggtgctttctccgaccgatgctgtggcgctctccgggattgttggcgaagggcgcatcccgaaaaaaatcatgggcattttgcagggcgaagcgttgatgaatgacgcctccggtctggtgagcttgaagtttgccgtagcagtggcgatggggacgatgatcttcaccgtcggcggtgcgacggtcgaatttatgaaagtagccattggcggtattctcgccggttttgtggtgagctggctgtacggtcgcagcctgcgattcctcagccgctggggcggtgatgaacccgcgacgcagatcgtcctgctgttcctgctgccattcgcttcttatctgattgccgaacatattggcgtttccggcatcctcgctgcggttgccgccgggatgaccatcacccgctccggtgtgatgcgccgtgcgccgctggcaatgcgcctgcgtgcaaacagcacctgggcgatgctggaatttgtctttaacggcatggtgttcctgctgttaggtctgcagctgccgggtattctggagacgagcctgatggcagcagaaatcgaccctaacgtcgaaatctggatgctgtttaccaatattattctgatatatgcggcgctgatgctggtccgtttcggctggctgtggacgatgaaaaagttcagcaaccgcttcctgaagaagaagccgatggagtttggtagctggaccacacgagaaatcctgatcgcgtctttcgccggggtgcgtggggcgatcactctggccggtgtgctctctatcccgctgctcttgccggatggtaacgtcttcccggcgcgctatgagctggtgttcctggcggctggcgtcattctcttcagcctgtttgtcggcgtggtgatgttgcctattctgctacaacacattgaagtcgcggatcatagccaacaattgaaagaggaacgtattgcgcgagcggcaacggcagaagtggcgattgtggcgatccagaaaatggaggagcgtctggcggcggataccgaagagaatatcgataaccagctgcttacggaggtcagttctcgcgtcattggtaacctgcgtcgtcgcgccgatggacgtaacgacgttgaaagttccgtgcaggaagagaaccttgagcgtcgcttccgtctggcggcattgcgttctgaacgtgctgaactttaccacctgcgcgccacacgggagatcagcaacgaaacgctgcaaaaattactgcacgatctcgatttgcttgaagcgttgctaattgaggaaaatcagtaagccgaaagcgacgtaaccaggcccgaggtaatctgaaaaaggtgcaatcttttgcacctttaacaggttagctcgggctaacattcatgattctaaaacaaataaattatctctcttttaaagtcaattcattggctgttcttcgacttaacctcaatctgcatcttgcataatatctgcagtaatcttcatagcgactgcatgaagattatcctcagtttgactcatgccagtatgagtggcacaatcttcttcaaagaatttctgtagtgttaccaggatatcactattaatggagatattttcctcaccacggagaatggtaatacccattccctggacgctagcctcatcgaaattaacacgatagagacggatattaaacatccaggcttttgttaaaacagaacagttgaaatggcaattgcttaaattggcattattaaaattaacattagccatattagagtcggtacatataaccatttcgaggaacgtatttgttaaccgcgtaaaaaagagtttgctatcaattaagtttatattctggagggttgctttattcaggttgacacgagacagatcagcatgttcaaagttaattaaatcaagtttagagaagctaaggtcggctctaaataaattaatatatggcgctattactttataaagatttacctcagccatgtatgccatataaaaattactataatcaaggaaggtatttttaatattggctctattcattgttgcattgtagaattgaacatgcatagcggaacaactatttagagttccgtcagtcatttttatctgagcgaaattactgtcatcgagaatacaattatcaaaaagtattttttccattatggcgaaattaaaattcgttttatacatattacagtcctgaaaaatagcgttttgtagtctgcaacctgcaaaattgctattggataaatcttcatctttaatcacgatacctttcaggctaaggtgactaaaatcgtaaccaccatttactgtctgtgggatttcgatagtattattatggacggtgacattatttataaaatataccaccttaatactcacttccttatctttattaaggtaaactcttctcgtaattctatcgtcacatttattatttgcatgactagctatatctataaaatatttatgtattttcctgtccgtttctttcgtgatttttccacttggtaaactatcataaattcttttcattttctgaatcaagcctatcactttttcatgatcatccattttgaaaagagagagggctttattgtcaattaacgtgtttttatgatgtttgctgtaattatcactttttgttttctttgtatgacttggacttgtgacagagtggttatcgttaatcaggcaaagagggaaaaacatattatttaaaccattatagcgcataaaatatccttataattaacaagaaagaaaaggcatattctctgcattatcattttctacgactgtcaaaaatcgctcattttttaatgagtttatttgtttaatattatgggaaaaggtgatgcatttgggagaggaagagtattccccggtcagacgaccggggaaggggagagattaatgcgcgcggccttgctcaacgccaaagccggtctgggagcggataaactgcgcgcggaacagttcacgctcacgcgcgccttccgcactgttatcggttgcgctgaagaaccagatgccgaggaatgccacggtgatagagaacagcgccgggtattcatacgggaagatggctttttcgtgaccaaggatctgtacccaaatcgtcgggccgaggatcatcagtactactgcggtaatcagccccagccagccacccatcatcgcgccacgcgtggtcagtttgctccagtacatagaaagcagaatgatcgggaagttacagctcgccgcgatggcaaacgccagccccaccataaaggcgatgttctgattctcaaacagcacgccgaggataatcgcaatcacgccgaggatcagtacggtgattttacttacccgcagctcttcacgttcggtcgcgccttttttgaagacgttagcgtacaagtcatggctaaccgcggatgcgcccgccagcgtcagacccgcaaccaccgcgaggatagtggcgaaagcaaccgcactaataaaaccgaggaacaggttgccgcccactgcattcgccaggtgaacggccgccatgttgttaccaccaatcagatggcccgccgcgtctttatattccggattcgcaccaaccagcatgatcgcgccgaagccgataataaaggtcagaatatagaagtagcccataaacccggtggcgtagaacacgctcttacgtgcttcgcgggcatcgctgactgtaaagaagcgcatcagaatgtgcggcaagcccgccgtaccaaacatcagtcccagacccagagagagcgcggagatcggatctttcaccagcccgcccggcttcatgatgtcgacacctttcgggtgtaccgccatcgcttcactgaacagattgttgaagctaaagccgacgtgtttcatcaccataaaggccataaagctggcaccgaacagcaacagcacggctttgataatttgcacccaggtggtcgccagcatgccgccgaacaggacgtacatcatcatcagcacgccgaccagcaccaccgcaatgtgatagttaaggccaaacagcagctcgatcagtttacctgcgcccaccatctgggcgataaggtaaagcgccaccaccaccagagaaccacaggcgctaagaatacgaatcggcccttgtttcagacggtaagaggccacatcggcaaaggtgtagcgccccaggttacgcagacgttcggcaatcaggaacaaaatgatcggccagcccaccaggaagcccaggctgtaaattaagccgtcatagccggaggtaaacaccagcgcggagatccccaagaaactggcggcggacatatagtccccggcaatcgccagcccgttctggaagccagtgatattgccgcctgcggtgtagtagtcgctacgagaacgtacgcgtttacttgcccagtaggtaatgccgagcgtaaacacgacgaaaatcaggaacataataatcgcctgccagttcgttggctggcgctctacggccccgctaatagcatccgcggcgttagctgcgaaagggagtgtggcggcaagcgccgtcagaactcttttcatgatgcttgtacctcatgcagttatttcaacttgcttgtacctcatgcaggacttcattattaagacggtcgaattcgccgttcgcccgccagatgtagataccggtgagaacaaaggagatcacaatcactccaacaccaattggaataccgcgtgtgacgctggtgttcggattcagcggcgtgcccagccagccgggcgcgaaggcgatcagtaaaataaagccgatataaactgccagcataataatgctcaggatggtggcaaaccgttgccgtttttcgactaactccctgaaatgcgcattgtcttctatccgctgataaatagtgccattcatcacagattctccagaggtaatgtagggattgttttaattcccgctcccttatgggagaaggttaacgctcgggtaacccttgccgaatgtaggccggataaggcgtttacgccgcatccggcaatcaatgcctgatgcgacgctgtcgcgtcttatcaggcctacaaaccgttaccgactcgcatcgggcaattgtgggttagcttggcatcgcgatagcctgcttctcttcaagcagcttctcgactacgccaggatcggcaagcgtgctggtatcgcccaggttgctggtatcgcccgccgcaattttgcgcagaatacggcgcataattttgccggagcgggttttaggcagggagtcggtccagtgcagcacgtctggcgtcgccagcgggccaatctctttacgcacccagttgcggacttctgcgtacagttctggactcggttcctccccgtgattaagcgtgacgtaggcgtagatcgcctgacctttaatattgtgcggaatacctactacggcggcttcggcaatcttcggatgcgccaccagcgcgctctcaatctctgccgtccccagacggtgaccggagacgttcagcacgtcgtccacacgcccggttatccagtaatagccatcttcatcgcgacgcgcgccgtcgccgctgaaatacatatttttgaaggtggagaagtaggtctgttcaaaacgttcgtgatcgccaaacagcgtacgcgcctgacccggccaggagtcggtgattaccaggctaccttcggtggccccctccagcgggttaccttcgttatcgaccagcgccggttgcacgccgaagaacggacgtgttgcgctaccggctttcagctcggtagcgccaggcagcggggtgatcatgaaaccgccggtttcggtctgccaccaggtatcgaccaccggacatttctcgttgccgatttttttccagtaccactcccacgcttccgggttaattggctcgcccacggaaccgagaatgcgcaggctgctacggtcggtgccttcgatcgctttatcgccttccgccatcagcgcgcggatcgccgtgggtgcggtatagagaatattgacctgatgcttgtccaccacctgcgccatacgggcaggcgtcggccagttgggtacgccttcaaacatcagcgtggtcgcaccgcaggccagcgggccgtacagcaagtaactgtgtccggtcacccagcccacatcggcggtgcaccagtagatatcacccggatgataatcaaagacatatttaaaggtcagcgccgcgtacaccagataaccgccggtagtatgcagcacaccttttggcttaccggtagaaccggaggtgtagagaataaacagcggatcttcggcgttcatctcttccgcctggtgctgatcgctcgcttgctcaaccaggtcgtgccaccacaggtcgcgcccttcctgccagtcaattttcccgccagtacgcttcagtaccaccacatgctctacgctggtgacgttcgggtttttcagcgcgtcatcaacgtttttcttcagcggaatactgcgcccggcacgcacaccttcgtcggaagtgatcaccagtcgactgttggaatcaataatgcgcccggcaacggcttccgggctgaagccgccgaaaatcacgctatgcaccgcgccaatgcgggcgcaggccagcatcgcaaccgcggcttccggcaccatcggcatataaatcgccaccacatcaccttttttaatgcccagctcgagcagggtattggcgaagcggcagacgtcgcggtgcagctctttatagctgatatgtttgctctggctggcgtcgtcgccttcccagatgatggcggtacgatcgccgttttcttgcagatggcggtcaaggcagtttgccgccagattcagcgtgccgtcctcgtaccatttaatggacacattaccgggggcaaaggaggtgtttttcaccttctggtaaggtttgatccagtcaagaatttttccctgttcgccccagaaggtatcaggtacgttaatagattgttgatacatcgcctcgtactgctgagggtttatcaggcaacggtctgcgatgttggcaggaatggtgtgtttgtgaatttggctcatgcttttgttctccttgtaggatgttaataatatgtggcataagcgttaaatgtaggggtattggcagttttgtttagtatttgggcgacagatcacgcaaaagtagaattgtgcaaataaacggcagggtaatttttgaaggtcagcaacaaaagttgattaattctttgaggaacatgcagttatgcatgctgttgaaaaagaggaagatactgactaactctaaagtggtattttacatgcacttacaattgattaaagacaacattcacagtgtggttatttgttacacataggggcgagcaatgtcatgacagtgtaggtgcggttactgtcgtgaaaaacaataaaaaccgccattgcaacaatggcgcaattcggatgaagcccctatgacaaggataaaaataaacgcacgccgtatcttcagcttattgattccttttttctttttcacttctgttcacgctgaacaaacggctgctcccgcaaaacctgtaactgtggaagcgaagaatgaaacctttgccccgcagcatcccgatcaatatctctcctggaaagccaccagcgaacagagtgagcgtgttgacgccctggcggaagatccacggctggtgatcctgtgggcggggtatcccttcagccgcgattacaacaagccgcgtggacatgcttttgctgtgaccgatgtgcgtgaaaccctgcgtaccggtgcgccgaaaaacgctgaagatggtccgctaccgatggcatgctggagttgtaaaagcccggatgtggcgcgtctgatccagaaagacggcgaagatggctacttccacggtaaatgggcgcgcggcggtccggaaatcgtcaacaacttaggttgtgccgattgccataacaccgcctctccagagttcgccaaaggcaaaccgaagttaaccctttcccgtccgtatgcggctcgcgcgatggaagccattggtaaaccttttgagaaagccggacgtttcgaccagcaaagcatggtttgcggtcagtgccatgtggagtattacttcgacggcaaaaacaaagcggttaaattcccgtgggatgacggcatgaaagtcgaaaatatggagcagtattacgacaaaattgccttctctgactggactaactccctgagcaaaacgccaatgctgaaagcgcagcacccggaatatgaaacctggacagcgggcattcacggtaaaaacaacgtgacctgtatcgactgccatatgccaaaagtgcagaacgccgaaggcaaactctacaccgaccataaaattggtaatccgtttgataacttcgcccagacttgtgcgaactgccatacccaggacaaagctgccttgcaaaaagtggtcgcggaacgtaagcagagcattaacgacctgaaaatcaaggttgaagatcaactggttcacgctcacttcgaagcgaaagcagcgctggatgcaggcgcgacggaagctgaaatgaagccaattcaggacgatatccgtcatgcccagtggcgctgggatctggcgatcgcttcccacggcattcatatgcacgcaccggaagaaggtttacggatgctcggtacggcgatggataaagcggcggatgcacgcaccaaactggcgcgcctgctggcgaccaaaggcatcacccatgaaatccagatcccggatatcagtaccaaagagaaagcccagcaggccattggcctgaacatggaacaaatcaaggccgagaagcaggacttcatcaaaacggtgatcccgcagtgggaagaacaggcacgtaaaaacggtctgttaagccaataaccccgttccgcctcgcaaggggcggaaaacacaatggagtgaatatgagcgtattacgtagcttattaactgccggggtgctggcgagcggcctgttgtggagcctgaacggaattaccgctacccctgcggcgcaggcatctgatgatcgctacgaagttacccagcagcgtaacccggatgccgcctgtctggactgtcataaaccagataccgaaggtatgcatggaaaacatgcttccgttatcaacccgaataacaaactgccggtcacctgcaccaactgtcacggccagccaagtccgcaacaccgcgaaggggtgaaagatgtgatgcgctttaacgagccgatgtacaaggttggagagcagaacagcgtctgtatgtcctgtcatctgccggaacagttgcaaaaagcgttctggccgcacgatgtccacgtaaccaaagtggcgtgcgccagctgccattccctgcatccacagcaagatacgatgcagacgttaagtgacaaaggacggattaagatttgcgtcgattaccacagcgatcagcgcaccaatccgaactttaacccggcgtctgttccgttgcttaaggagcagccatgacctggtctcgtcgccagtttctcaccggcgtcggcgtgctggcagccgtcagcggcaccgcagggcgcgtggtggcgaaaacgttgaatatcaatggggtgcgttacggcatggtgcatgacgagagcttatgcatcggctgtaccgcctgtatggatgcttgtcgggaagtgaacaaggtgccggaaggcgtcagccgcctgacgattattcgtagcgagccgcagggcgaatttcctgatgtgaaatatcgcttcttccgtaagtcttgccagcactgcgatcatgcgccgtgcgttgacgtctgcccgaccggtgcgtcttttcgcgatgctgccagtgggattgtcgatgttaatccggatctctgcgtcggttgtcagtactgcatcgccgcctgtccgtaccgcgtgcgctttatccatccggtcacgaagacggcggacaaatgcgatttctgccgtaagaccaatttgcaggccggtaagttgcccgcgtgcgttgaagcttgcccgaccaaggcgctgacgtttggcaatctggacgatcccaacagtgagattagccaactgctgcgccagaagcccacttaccgctacaagctggcgctgggaaccaaaccgaagctgtaccgcgtaccgtttaaatacggggaggtgagccaatgacgcagacttccgcatttcattttgaaagcctggtgtgggactggccgattgccatctacctgtttttgattggtatttctgctggtctggtgacgctggccgtgctgttacgtcgcttctacccgcaggcgggcggtgcagacagtacgttgctgcgcaccacgctgattgtcgggccgggcgcggtgatcctcggtctgttgatcctcgtcttccacctgacaagaccgtggaccttctggaagctgatgttccactacagttttaccagcgtgatgagcatgggggtgatgctgtttcagctctacatggtggtgctggtgctgtggctggcgaaaatctttgaacatgatttgcttgccctgcaacaacgctggttgccgaagctggggatcgtgcaaaaggttctgagcctgctgacgcccgttcatcgcggactggaaacattgatgctggtgctggcggtgttgttgggggcttataccggctttctgctgagcgcgctgaaaagctatccgttcctcaataacccgatcctgccggtgctgttcctcttctccggcatcagctccggtgcggcggtggcgctgatcgccatggcgatacgccaacgcagtaacccgcattccacggaagcgcagtttgtacaccgtatggaaatccctgtggtatggggtgaaatcttcctgctggtggcgttttttgtcggtctggcgctgggcgatgacggtaaagttcgtgcgctggtggcggcattaggtggcggtttctggacgtggtggttctggcttggtgtcgccgggctggggctgattgtgccaatgctgctcaaaccgtgggtcaatcgcagttccggcattcctgccgtgctggcggcgtgtggggccagtctggtcggcgtgttgatgctgcgctttttcattctctacgccggacagttgacggtggcgtaagccagaaaagaggtggtttctggacgtattccttcctgaagtcggttttctggcgttgttgttaagtctcggggtcaacgtgttgaccccgttgacggccttcgcgggagtgcggttgcgctggcctgccatgatgcgactcacttgcatcggcattctggcgcagttcgcgctcctgctgctcgcctttggcgtactgacgtattgttttctcatcagcgatttcagcgtcatttatgtcgcgcaacatagctatagcctgctgagctgggaactcaagctggcagcggtgtggggcggccatgaaggtagcctgctgctttgggtgctgctgctttccgcctggagcgcgctgtttgcctggcattatcggcagcaaaccgatccgctatttccgctgacgttagccgttttatctctcatgctcgccgcactgctactgtttgtggtgctgtggtccgatcccttcgtgcggatatttccaccagcaatcgaaggccgcgatctcaatccgatgctgcaacatcccggtcttatctttcatccaccgctgctttaccttggctatggcggtttgatggtagcggcgagcgtggcgctggcgagtctactgcgcggcgagtttgatggtgcctgcgcccgaatttgctggcgctgggcgttacctggctggagtgcattaacggcggggatcatcctcggttcctggtgggcctactgcgaactcggctggggcggctggtggttctgggatccggtggaaaacgcctctttattaccctggctttctgccactgcgctgctgcacagtttgtccctgacacgccagcgggggattttttgccactggagcctgttgctggcgatagttactctgatgctgagcctgctgggcaccttaattgtccgttctggcattctggttagcgttcatgcgttcgcgctggataacgtccgcgccgtgccgttgttcagcctgtttgcactgattagccttgcgtctctggctctgtatggctggcgagcgcgggacggtggcccggcggtgcattttagcgggttaagccgggaaatgttaatcctcgctacgctgttgctgttttgcgcagtgctactgatcgtgctggtgggaacgctttatccgatgatttacggcctgctgggctggggacgcctctccgttggcgcgccgtattttaaccgcgcgacgttaccgtttggtctgttgatgctggtggtgattgtgctggcgacgtttgtctctggcaaacgcgtgcagcttccggcgctggtagctcatgcgggcgtgctgttatttgccgctggggtcgtggtctccagcgtcagccgtcaggagatcagcctgaatttacagccgggtcagcaggtgacgctggcaggatacaccttccgttttgagtgcctcgatctacaagccaaaggcaattacaccagcgaaaaagcgatagtggcactgtttgaccatcagcaacgcattggtgaactgacgccggagcggcgtttttatgaagcacgccgtcaacaaatgatggaaccgagtattcgctggaacggcatccatgactggtatgcggtcatgggggagaaaactgggccggatcgttacgcttttcgtttgtatgtacaaagcggtgtgcgctggatctgggggggaggattgttgatgattgcgggcgcattgttaagcggatggcgggggaagaagcgcgatgaataaagggcttctcacgctactgctgttatttacctgttttgcgcacgctcaggtcgtagacacctggcaattcgccaatccgcaacaacagcaacaggcgttaaatattgccagccagttacgttgtccgcagtgccagaatcaaaacttactggaatccaacgcgccggtggctgtcagtatgcgccatcaggtttacagcatggtggcggaggggaagaacgaagtcgaaatcattggctggatgaccgaacgctacggagattttgttcgctataacccaccgttaacgggtcagacgctggtgttatgggcgctgccagtggtgttgttactgctgatggcactgatcctctggcgagtgagggcgaagcgatgaaacagcccaaaataccggtgaaaatgctgacaacactcacgatattgatggtatttctctgtgtcggcagttatctgttaagcccaaaatggcaggcggtacgtgcggagtatcagcgtcagcgcgatccgctacatcagtttgccagccagcaaaccccggaagcgcagcttcaggcattgcaggataaaatccgcgctaatccacaaaacagcgaacagtgggcgttactgggcgagtactatctgtggcaaaacgattacagcaatagcttgctggcgtaccgtcaggcgttgcaactacgtggtgagaacgctgaactgtatgcggcgctggcgacggtgctttattaccaggccagccagcatatgaccgcccagactcgcgcaatgatcgacaaggccctcgcgctggacagtaatgaaatcaccgccctgatgctgctggcttccgatgcgtttatgcaggcgaactacgcgcaagccatcgaactatggcaaaaagtgatggatctcaacagtccgcgagttaaccgaacacagctggttgagagcattaatatggcgaaattgttgcagcggagattggattaatcatctggtgatgaagattatgtcattgagctgcataaaaaataatcgaatgaacatatgccaaaaataatcactaatcagtattattgcagattaaacaaataaaaatctttccataacaaatggttattcattaatcctgccataaactcgcgttattatgcattaatgcagcgaaaagctctgttgttaaagggttgcgcaacataccgcgcaaatgatactgatcataagcgttaaaaaaatctacaaaccaacgcaacacaattcatgccccggcagtatgtcacgttctcgcgtttctgaacggggaacggcgctccattgaggaagtcattcatatgaaaaatataaaattcagcctggcctggcagattctgtttgctatggtgctgggcattctcctgggaagctacctgcactaccatagcgacagccgcgactggctggtcgtcaatttgctctctccggcgggtgatatcttcatccatctgattaaaatgattgttgtgccgattgtgatctccacgctggtggtgggtatcgcgggtgttggtgatgccaaacagctcgggcgtattggcgcgaaaaccattatctacttcgaggtgatcaccaccgtcgccatcattttggggatcactctggcgaacgtcttccagcccggtgccggggtggatatgagccagttggcgaccgtcgatatcagcaaatatcagagcactacggaagcggtacaaagcagttcccacggcattatgggcacgattttgagcctggtgccgacgaacattgtggcgagcatggcgaaaggcgaaatgctgccgatcatctttttcagcgtgctgtttggtctggggctttcttccctgcccgcgacgcatcgtgaaccgctggtgaccgtgttccgctccatctctgaaaccatgtttaaagtgactcacatggtgatgcgttatgcaccggtgggtgtgtttgcgctgattgcggtgacggtggctaactttggtttcagctctctgtggccactggcgaaactggtgctgctggtgcatttcgccattctgttcttcgcgctggtagtgctgggaattgtggcgcgcctgtgcgggttaagcgtctggatcctgattcgtattctgaaagatgagctgattctggcgtactccactgccagctctgaaagcgtgctgccgcgaattattgagaagatggaagcctacggagcaccggtgagcatcaccagtttcgtggtgccgaccggttactcttttaaccttgatggtagcacgctgtatcaaagtattgccgctatcttcatcgcgcagttgtatggcattgacctgtccatctggcaggaaatcattctggtgctgacgctgatggtgaccagcaaagggattgctggcgtgcctggcgtgagctttgtggtgttgctggcaacgctgggtagcgtaggtattccgctggaaggtctggcgtttattgctggtgttgaccgtatcctcgacatggcgcgtactgcgctgaacgtggtgggtaatgcgctggcggtgctggtgattgccaagtgggaacacaaatttgaccgtaagaaagcgctggcttatgagcgtgaagtgctgggcaaatttgataaaactgcggatcaataattgaagattgccggggatatccacccggcaatgtgtgaatgcctgatgcgacgcttgccgcgtcttatcaggcctacgccagacagcgcaatagcctgatttagcgtgattttgtaggtcggataaggcgtttatgccgcatccgacatcaacgcctgatgcgacgcttaacgcgtcttatcaggcctacgccagacagcgcaatagcctgatttagcgtgattttgtaggtcggataaggcgtttacgccgcatccgacatcaacgcctgatgcgacgcttgccgcgtcttatcaggcctacgccagacagcgcaatagcctgatttagcgtgattttgtaggtcggataaggcgtttatgccgcatccgacatcaacgcctgatgcgacgcttaacgcgtcttatcaggcctacgccagacagcgcaatagcctgatttagcgtgattttgtaggtcggataaggcgtttacgccgcatccgacatcaatgcctgatgcgacgcttgccgcgtcttatcaggcctatcttaaccgttggttaatttttcaaactcttcacacccggtatcaaacccttccatacagctcaggttcaaccagtgcagcgccttttgcttgttcttctcgataaaaccttcttcaccgtttaagaacatcattcccgcccagtactcggaataaccggttcgggaaattgcagagctgcgtttgaaataccaggttgccttgtcatcgtcggccttaatgcccacgccgttggcgtaaatcaaaccaagcagcatttgggcatcgacggcagagtcgttctccagatcttcgctggcgttttctaacaggctaattgcctttggataatccggtttacccgcttgagtatttaccagaatatgcgccagcgttacttcaccttctttactgcccgcttgcgccgctttctctgcaagaacttttgcttgtggatagtccagactgaccggattggtgattttgatctgcgccagcagcgcgcaggcatcagcatcaccgctgtcggcggctttctgtgcccaatattcggctttgctcaaatcgccggagctaaaccagctgtcggcaagaaaatattgtgcgcgtcggtccccggcctctgctgcctttaaatactggctgccaggctcggagtcgttggcgtgggcaaagaatgtcaaaaacaacatcaatgcgataatttttttcattttgataatacgattgggtagggagtaaccagtataaagagttcgaatggataaaaaaacagcctccgaaaggaggctgtagaaaggacggtattacgccagtgccgcttcgcgcaggcgagttttcaacttgttgtactcgtcaatcacgtactgctcggcggcgcgctgatcggcgatcggctcgacgcgaacggcgcagtatttgtactccggcgttttcgtaatcgggcttaagttttcggtaaccagctcgttacaggcaccaatccaccactggtaggtcatgtaaatcgcccctttgttcggacgatcgctgacctgcgcacgggtgataattttgcctttacggctgtgcacccaaaccaatgcctcatcttcaatacccagacgtttggcgtcttcggtattgatttgtgcgtagccaggttcatcagccagcgccgccagtgccgcacagttaccggtcatgctacggcaagagtagtgaccaacttcacgcaccgtactcagtaccatcgggtactcgtcggtgagtttgtcgattggcgctacccagtcgcaggtgaagaactgcgccagaccgttcggggtatcaaacttctctttaaacagataagaagtcccctgatcggcatcactagtatcgcggcaaggccactgaatgaagcccagttcgcccattttctcgtaagtcgcaccgtagaaatccgggcacagatgacgcaactcatcccagatctcctgggtgttgttgtagtgcatcggataacccatacgggtggcgatttcactgatgatttgccagtccgttttcagatcccatttcggttcaaccgccttgaagaaacgctggaagccacggtcagccgcagtaaacacgccttcatgctcgccccagctcgtactcggtaaaataacatccgccgcgctcgcggttttggtcataaagatgtcctgaacgataaccagttccagatcttcaaaggctttacgtactgcgctcagctccgcgtcagtttgtagcggatcttcgcccataatgtacgcggcacgcacttcgccatgcgctgcgcggtgcggcagctcgctgatgcgatagccggtatgcgctggcaggctttccacgccccaggctttggcgaatttctcgcggttagccggatctttcacgtactggtatcccggatacgtatccggcagcgcgcccatatcgcaggcaccctgaacgttgttctgaccacgaaccgggttaacacccgcatgcggcttaccgaggttaccggtcagcatcgcgaggctggtcagagaacgcacggtttccacgccctggtagaactgggttacacccatgccccacaggatggcggcgcttttcgcctgggcatacatccgtgccgcctgacgaatctcactggcgctgacgccggtgatatcttcaacgctctccggcgtgtagccttcaacgattttacgatactcttcaaagccttctgtacgactagcgacgaacgctttgtcgtacagattttcttcaataatgacatggcccatcgcattcaacagcgcgatgttgctgccgtttttcagtgcaatgtgcatgtcagcaatgcgcgcggtttcaattttgcgcggatcgcagacgataattttcgccccgttacgtttagcgttaattacgtgattcgccacgattgggtgggaatccgccgggttgtacccgaaaacgaacactaaatcggtattatcaatttcgttaatagcattgctcattgcgccattaccgacgctttggtgcagacctgcaacgcttgggccgtgtcagacacgagcgcagcagtcaacgttattggtaccaataacggcgcgcgcaaatttttgcattacatagttggtttcgttacccgtaccacggctggagccggtcgtctggatggcatccggaccgtacttctctttgatggcgctcaggcgctcggcaacgtaattcagtgcctcatcccaggaaacaggttcgagtttgccgccacgctggcgacggatcatgggggttttcaggcgcggggtcaggatctgggtatcgttaatgaagtcccagccataataacccttcagacacagggtaccctggttggttttcccctgcgctgcctccgcccggacgattttgccgttatcgacgaccaggttgattttgcaaccacttgcgcaataggggcaaaccgtgacgacttttttcatcggtctcgctccagttaatcaaatcacgcatacgcgctctcgactacagtatgcatcttttatgccacattttatgtggggtcattccctgatattacgggcactatttattcaaaactctgacgaaaaacaggctgtcgtcagttttgacgtgacgaaacgaaataccgcgtgacagccatcacgcggcagacattttattttttctcgacgacgggacctgcctgatacccgccgcccaggcttttcatcaactgaatgctttggatcacccggcggctgtccagcatcagtaaactcatctcttcggcaagcactggcaaccgggcttcggtggcctgtaagcggctggttaagccgcgctgataggcggcctcggcagcgcgctgggtaaagcgcgtggcttccacgcgttcagcctgcatttctcgctcgtcgttgagcgtttgcagacgcgtgccgttgacggcaacgtcacgcaccgcgttcagtacactctggttgtaacgttcaatcatcatgttgctggcggcgcgcgtgccttcgagattggcattcaaccgtccaccgtcaaacagcggcaatttcagacccgggatgaagttgaactggcgactggtttttttgaataaggtatgcagatggatggagtccagaccgaaaaacgctttgatatcaaagctcggatagaacaacgcccgcgcggaatccacctgatctaaactcgcctgaacataccagcgcatggcttgcagatccgggcgtctggcgagcaactcataagagagtgtcgccggaatgccggtctggacttgcggtaatgccaccggtctgatctccggcatatcgctggctcccgcgccaatcaatgcacgcagagattctcgcgtttcggtgatttgccctttgacggcaacaatttgtttatcgaccgccagaatctgtgcccgcgcgccgtggaaaggcacttgcgcttccagaccgtgcgccactttactctggtgcgctttcaccgcgtaatcaatcacatcgtgagtttgttctaacagatcgagcatctgatagctggcctgcatactgtaataaagctgcgctacgcccgtggccaggcttagctctactgctgcggtttctgccagcgcggcattatgcgcgccaatggcggcggcaaccgcactgcgatgcacaccccacaaatcaagatccagtccggcaaacaaacctactgtggcttccgtatagtacggcccgtccatacccagtgctggcgcatccatactataagggcttaaaaagccgttcgcgctgacacgttggcggttgagcatccctaacgctgcgacctgtaattgactaccggcatctaacaaatcggcctgggactgcgctttttcttcccgcagtttcgcttcggcgagggtgtgactaccacttagcgtccgttggatcagcgcatccagctgcgggtcattgagttgtttccaccactgcgcctgcggccagccggagctggcaagatgaatatcgtcggccagtttgatttgttccggtttgagctgttgatgaggtgcagaatccttacgtaccagggcacagccggaaatcagcgtcgtgctgccgagaatgctgcacaacagcagacgactaagttgacgattgatcattgcgtggctccttgtgcctgttccgtggcgggcgttaatgccggggctgtccagtctggcaagcgggcgaaaagctggcagacgtgttgctcctgttttaataaggtgggcaggatggcctgagaggcgggtgtctcttcaagcgttatttgaggagaacggctgagtgcggttgccagaccggcagcgtatttctccagggcgtcggcaaactgacctgctctgtccggctgtagtgcgttatccagcgcctgcgcgctgttccaggtggcatcccaggcgtgaagaagatcgcggccctgacgaataaccgtttggctacgttcaatcagtaatgcgcgttcttcgctgtccagttgacgctccagcgccacgcgttggcacatctcttcacaggcattaaacgccgcatgcagaccgatacgaatttgcagataagtgcgcagagccgtgacttcctgctggcgtgggatccgcattactttacttaacatacccagcgtgccagccagtttttgcggcagtgtgcgcgcttcactttcaggccagacaaaggtgtaaatcaccgcggacaccacggtaccaatgatgatacccagggcgcgatcgcgaatttccaccaggtcgtacactgggccaaaaacgttttcgagcgtggcgagcgcgaaggtgaccaccatctgtgtgccgatataagaagagcgttcagagctggtggcaatccatgcgcccaacaggaaaatcggtgccagcacaaacagcaattcgacaatattgtccagccagggcatgaccagtagcgtgaataacagcgccagaatcgcgccgcaaaaggccccgccaaaacgcagcaccatcttctggtagctgctaccgacatttgggttagcgacgatcacgcatgtcagcatacaggtgtgaatgccttcccagtccacgccgctgtaaaaggtgtaacagatcaaacaggcgagcagcgtttttaccgcgtagcgcatatagtctggattggtaaaagcatcggcggccatacttggcggtttggctgcgggcgttggcggcgtattcgggtccatctgacccagttgtaacaacgtctggcagatattctccaggttacattcccgtgccgccatcgcttcactttcactgatccgccagtcgctttgccagcactgaccttcagcaacggcatgctgcagcttgttgatttcactagctaatttttgtcggaattcaataattgcctgagaatcagcaaaagaggtgggatcgtagcgattcagcgtgctgtaaatgtaggttaccgttgccacgcagctttgccaccatgcgttttgagttcgccagttggcatcgtccgcgaggcaaaagacattgagtttttgtagcgccagcgcctctctttcaatccgcgtttcgggtagcggtgcgaggctgtctgtcaggtgactaatggcatcatcaagccgatcattaagcgcctgatgcatttggctaatggcacgactgggaaaccacagcacgccgattaacgtcatcagcaaggttggatagaggccaacaacgatacaccacagcgttaagcgcacgaccacttccggatagtcgagcatggcggggaaggtttgcccgtaaatagcgacaatggcgacggcgaaaaagaccagccccaagcgatgggtgcgcatcaaaaacatgcagcccatcaggatcggtccggcgatgatcaatcggatcaacggttcgccgtaactccatttgtagatcaaaaacaggctgccgatctccagcaccgtggcaaccacaaacaagatcgcgacaaatttggtgtaaaacgcgttgctctgaataccgtaaaacagcactgccaggcttaacgccacaaaagggatctcaaaggtcatgctgatcagaatcaccagcaggcagcctacccagagttgcacggtctgcggcacgcgacctggtcgccgctcgcttaactcttcatgaaagaacgccagcagcctgaccaccggtaatggcagggagttgagcgcgctcattattgcggctcaagattagcgactgcgctagcgccgatgcggaacatttccgggtcaggtttatcgaccatgattttgaccggaaaacgctgggcaacgcggacccagttaatagaacgagacactttcggcaggccgcccagcaccaggccgccgtcatccggtagcacgccgtagccaatgctatccactttaccctcgaaggttttgccgctgtcactcatcaggcgaatcgttgcgggtgtaccactgcgaatatttttcagatcggtttcgcggaagttggcgatcacataccagtgacgagtgtcgattagggtaaaaatagggcgcatggcagaagcaaattgcccgacggaggttttgagggaaatgacccggccatcaaacggcgcgcgaacggtcgccatttccagatgcagtttggtcagggcaatatccgcttcgaccgccgcacgctgggcaactaatgcatccacgccgctgacggcgctggcggcactctgcgcctgtaacaatacggcattaagatccgcttctgcggcgcgctgcgccgttcttgcacggtcaacatcttccgcactgacaaaaccttctttcagtaatggctcggtgcggcgtaatgtatctgtggcctgtttcgcggcggcacgggctttttctatcgtggcattaacgctgtcggcaccaaactgttgcgcgtcaacgctacgctgggtgagcataatttgcttatccagcgccgcgagggaggcttcagctttcgccagattggcttcgtacgggcgcgggtcgatgcggaacagcaaatcgccctgtttgactgcctggttgtcggtgaccgccagttctacaatgcggccgctgacttccggtaccacatcaatggtatctgcactcgcgtaagcgtcattagtacttggcgcactgtctacgcgccagataacgaaaacaagggcaaccagcgccaacgcaaccactaacagagcagggaatttactgcgaggagcttttttcggcgtactttccatgagcgcgtctcaaatagattagaaaaatgccagccagaacagcatggcgtagagagcaaaaagggcggtataaataattccgacaaatgccagattgatatttgcccgctgaataactcgcctcgtgatgagcgtcaaaataaggctggcaatggcgcagaaaaaccagctgggataataagcgccgatcaccgggattgccggagataatgagcatcccgaaaccatgaagacgggaattatccaggctgtttttttgagttgcatcgccatgcgagagagaactgttggcatattaaatacatcctgtctgctgcgaacaatatctgtagtgaatatcaatatccattgaaggcgtcagtatggctattttcttgatgaataaaaatagctttattcagccaccgcattcataacttatatattttatttattaattggctgtatatatttttaaaataaatacttttgggggcttcagcgcccccaaaagcgagtgacattaatttggggttacgatattcacccacaaatcgaaattatccagacaggcgataatttcttccagtttcgcgccattgccaataattttggctttcttcgcttttaccagatccgccattttggcttgtccggtcagcacggcgtgcagatcttcacggctgatgtagaaagaggcgtcggcttgcggttgcagcgttttccggtagttaagcacgctatcgttcagcgtcaggttgaggttatcgccgttgctcatattgaagttcaggctgatatttttacccgcagctttcgcgctatcgaggcgaacggccataaagtcgaacagcatttcgacgctcatcccgcgaatggtgtccggggaaccggtggtgccgtggctgaacttatgcaccccttcgcgcagctctttcgcgccggtcaggtagaaaccgcgccatgtggcggactcggcctgatagcccagctgttcaaagttattcgcttgcagattcttcgcgacctggtcacccgggttggcggcaatcacctgtttcagcagttctgcgctccagcggtaatcaccttgcttgttcgcttcttgcgccaggttgatgacacgggcagaaccgcccagcgcctgcacgtaacgtttacccatctccacctgaccatacggatgcaggttagccgggttaccgtcgtaatagccaagatagaagttatacaccgcgcgggcgttgtggctgacagaaccgtaatagccgcggctggcccagttattggcaagtgcaggcggcagcttaatcatgtcgccgatttcattcatggtgtagccctggttcgccaggtgcagggtctggtcgtgaatgtacttgatggtatcgcggtatttaccaatataatcattgatatgcttattgccccagaccggccaggtgtgcggcataaacagcacttccgcgtcgttaccccacatatccagcgtttcgttcagatactcggtccacttgctggtgtcgcgggttttcgcgccgcgcagagtgtagaagttgtgcagggtatgcgtggcgttctcggcggtacacagggctttcagggccggaatatagaagtgcatttcggctggcgcttcgctacctggggtcatcaggaagtcaaactccaggccgtcgataatcatcttctcgccagttctgacgatagttttcgtcggtgcaataatgctcgggtcgcccgttgccagcgtcacgccaaggccattacccacattgccttgcgcgttgtgcggcagtaacagaccgtaagagtagagcgcacggcggctcatgatgttacccgccagcacgttttcgctgatggcttcgtccataaagcctgcaggggcaatcacctgaactttgccggatttaacatcggcttcagagataatgcctttcacgccaccatagtggtcggtgtggctgtgagtgtagataacggcaacaatcggtttttgcggacgatgctggaagtaaaggtcaagtgcggcttttgcggcaggcggcgtcaccagcgggtcgataacaataatgcctttctcgccctcaacgaacgtaatgttagagatatcctggccgcgcacctgatacattttatcggtgactttgaacaggccagaaataccgttgatttggctctgacgccacaggctggggtttacggtttccggcgctgcggcattaatatcaaatttgtaatcgtccgcgcggtagtaaactttaccgttcgcatcacgcagaataccttcatccagcagcggggcgataaatccacgctgggcatcgtcaaaatcctgacgatcgctaaacggtaaacttttggcgtaattctgattaacctgttgggtatattgagtggcggctttcgcttcctctttcgcgttagcggtatttaccatcatgccgctggcggcagttaacgcaataacaatcctgctcaaacggaataaccgagagttattcatataaatctccatttatcatttatgtcgtaaatatgtaatccatgcaaaatacgtcatttaaagctggcgttatcataattgggaaattgcgactttaataagtggaagtgtgagcggaacgcgccattttattaggcatttgtgctgaagagggaaaattacagtaaaactatcattgcagaaaataatatgagtcgttttatgtgtttattatatatattgtacctgtcgttggcacagcgggacattgcgctactgtgccaacgttttactcatggggctttagcacagaactgtggcaaaaaacgttgatgcgccaatattgctgcaccctgagcgccattaaagtcagaagaactggcggcaataaagcgcacgacctgatgcggcagtggacggcgcaggtacttttgggtcatggcaacgagagtctcgcgtgggaaggcgggcatatccatcacgccaccgcccaggatcaccgcatcgggatcgaacagattaatgctggtggcaatggcccgtgccgcgttttcaagcagactctggacgaaaggggcgttttccgcatggacgaaaagatcgcgcaatgggtaatttcggggctgttgttcgtaccagcgtcttagcgccattccagagcaattggtttccaggcacccaggattgccacacgcgcagtgttgggtcatatctcccagggggatatgacccagttcgcctgccacaccgtgtgcacccgtccacggcgcaccgttcatccacactgcgaaccccatccccgtaccgagataggccgccagaaccagttgttgcgtaaggcggttttctactacgtcccaggagagttgcaggttaacgtcgcgggaaaactcaaccggacaattcagcgtattttcgagcttatcggcgagatcatataaatccgccgctgttaacggcaggttaggcgtagaaataatggtgcgtttatctttactgaccagcgccggaaatcccatcaccagaccatgacagcgagcgttaaagcgcctgagttgctcgtcaatcatttcgccgataccgctcaccaggccgggagcaatgacttctgcggtccgctttttttcgcagtgtagcgtttcaccttctgctgtccgcagacaaaagcggatatgcgttgcccccatatccacgcccgctacgacgttatgctgtttttgcatgaggctgtacctcgctttttgcagccagaatctgcgcggtcataattctccatgcttcgtcgatattttccgcatgattaaacaggccggaagtgccgacgataaagacatccgcccctgccgccatcagtttttcgtaagttgcctggttgcaggaaccgtccacctcaatttcgtactccagaccttctcgttcacgccatgccttcagttcggcaagtttatccagcatttcaggaatgaacggttgtccggcaaagccgggatcgacagtcatgaccgtaattttatcggccttatggatatagtatttcatggcctcaactggcgtctccgggttaaggatcagccccactttcatgtcatgacggcggatttcatcaatcaggcggaacgcctggccgttgatggtttccggatgcagagtgatgaaatctgctcccgcacgcgccagttgagcaatgtaatcctgcggccgcgtcaccatcagatgacagtcgagcggtttagttgccagttttttaacctgacttacgaagaacggactgagtgtcagattggggacaaagtgaccgtccatgatatcgatgtggaagtaatcggcatggctgtcgataaattcgatctgttctttaaatttcagcagatccatacacattaagctgggggagattttcatgttcaattccttacttactgataagacggtcaagggcgacagccgcgataattaatccgcccatcaccaccagttggtaataggtttgtacctgcaaaatattcagaccgttgttgatggtgccgatgatcaacccgccaatcaccacagagaaaatgcgccccttgccgccgaagaaactggtgccgccaatgatggcgctggcaatggcataggtttcaaaacccataccggcaagcggttctgcggcaccgagtcgtgcagtactgacgacgcctgccagacctgcacaaacaccggagatgataaacaccaccaggatgtggaatttcacgtcaatcccggaatagaacgcgctatttttgttgccgcccagtgcgtagatgttgcgcccgagccgcatacgcgttgtcagaaaccaaaggatgagcgcgacaattagactgaagataacggggacaggtatcccaattacgctggcggcaaagaagttcacgaagtcaaaactgaagccgtatacgctgttggcatcggagatcaccagcgtgatcccacggaaaatcgcgttggtgccaagggtgatgatgaacgggtgtagccccgtccagttgaccaggcagccgttgatcgcccccagtgcgccgccaaccagtacaccgccaatcatcgctgcgagaaacgggtcaacacctgccaacatcagtttggcggtcaccataccggaaagcgccagaatcgcgccaacgctgaggtcgataccagcgaccaggatagcgaaaaactcgcccatgccgatcaataccgtcacggagctttgaataaaaatctgggtaatattattggtggtcagaaaatattctggactcaggctaccaaagatggcgacgatgatcgccaggataaaaaaggtgccgtatttatcccagaacagcgcaaagttgaacggtttcttctcgctcgcttcgctttttactcttgtggtaaagcccatgccataatctcctcttcgctcatgtcatcgcgattcgtcaggatttgcgtcagtcgtccttcgcagaacacggcgatgcggtcgcagacggtgataatttcaggtagttcagaactcaccatcaggatgacttttccgtcgtccgccagttggcgcatcactttgtaaatttcggctttcgcgccaacgtcgatgccgcgggtaggttcatcgaaaataatcacttccgggcaacagcacagccatttggagatcaggactttctgctgatttcccccggagagttcggtgatattctggtttacgctatgacatttcagcgccagcagttcgcgttgattttcagcggtacgttgctcgtcaacttcatgaaacaagcccatcgcgcctttatagccgccgtctttcagactgcggctgatcgccatgttctgagcgatggaaaagttggggaaaaaaccgttatcccggcggctttcagtgatgtaagccatcccttttttcacggcatccaggggactacgtggagagatatctttgccattaagacggatttctccgccagcgcgtttatccacgccaaacagacaattcatcagttcagtacgtccggaaccgaccagtccggcaaagcctaatatttctccccggcagacgctaaaactgatatcccggaccttttttctgtcacgactggtgacgttccgcacctcaaaaaccgtttcgtgcgcaaggttgctgacattctccttcatcgcgttaaaacggttttgcagttcgcggcctaccatcagacggacgatatcgtcattactcacatcgcttactatgccgctgcaaacgctgctgccgtctttcatcaccgtatagcggtcgcaaatacggcgaatttccgccaacttatggctgatatagacgatggccgtaccctctttacgcaactgattcatgatcagaaacagatagtccacctctttattggtgagactggaggtgggttcatccatgatgatgactttggcatcgagcatcagcgttttggcaatttctagcatctgcttgtggctgatagataaattcgccactttctcatctagatcaactttcaagcccacgcgtaataacatcatggcggcgcggacacgcatttctcgccagtcgataatattgacgccacagatttttttcgtcagatgacgaccaatatataaattttccagtacggttaattcatcaataacgctgagttcctgataaataatcccgataccgagttgtgccgctaatttatgatccagcttgttatagctaatgttattaatggtaatggtgcctttggtcggctcatgtattccggataaaactttcattagcgtggatttacccgcgccattttctcctagtaatgcatgtatttcaccaggataaaccgttaaattaacgctctttaatgcgtgaaccggaccaaaggacttgccgatccccgccatgcttatatatggcgtggccataaataacctctctgcacgaaatatcgtattattgcctgatggctacatttatcaggtctacgttcaggttattttgttggccggataagacacttcattagcatcatcatccggcatcattcagttttattgagtgaccaggatactatcgaccagtttaaattccggtgctttatccagcgggataaccttgccggatttctcagcgtcaaccatcagcttcagacccgttgcgccgatatccgccgggttctgggcaaccgtcgcggtcatttgtccggcttccaccattttgcgggcttccggaatgccatctgtaccgacgaccagcacttttcccgtttttccggcgtttgcgactgcctgagcaacacccattgccatcgtgtcattcgcgcaatagatcgctttaatattcggattacgttgcaacacgttagtggcgacatccagtgctttaatgcggtcccagtcggcaggctggctggcgacaagcttgatctggcttgcttttttgaaggcttcggtggcaccattacgacgcgcttcaccggaggcgttaccggctttaccctcaatgattgcgacttcaccaccttcagcgcccaatttgtcaataatgaagctcgcgcctttcgccccgacagcaacgttatcggtggtgacaaaagcttccacattgccgccagcttttttcagattatccatgtcgattttttcatcgagattaaccagataaatgccttttttccatgcgcgggcgacaggcatgaccagattcacactggataatggagcgaaggcgatacctttgtaatttttattactgagatcttcaaataactgcaattgagattgaaaatcgccttcactaggagaggcaaaaatatcaacgctgacgcccagtgtttttgcttcatcttcaatgccttttttcatatctacccaaaatgggttggagagggttttcaatacgacagcatattcggcggcagcaaaagcgctggtactcaacattaagcccacgagtgtgccgctgaaatatttcagatatttattcataataatgttctcacggtaaggggacaggtaactccgcgatggcggaattacctttttcttatttcagcgcgcctggactgaagaaatcaacaattgcgccggttttttgcatattaatattagcttgttcaatgttgagctgggcgacagagacaaaaaaagcgtccagcaaagttagttgtaatattcttgcgctggcattacgacctaataacggcgtttccggggctggactgcaaataatataatcggccagtttcgctatcggactatggtagctatgggttatacaaataatctttgccccgttcttttttgccagttctacggccgcttttacatcactggttcgcccggaatgggtcactaccagcacaacatctccttcctgtaacaagctagcggacatcatcatgatgtgagcatcaggataggcctgacagcgtacgccaatgcgcaagaacttgtgctgtacatcagcacagatagcattacttcctccggcaccgtacaaatcccgctgtctggcctgatagaaaaagcgggcggcacggtggatctcatcaacgttgacgatgctctgaccttccataatggtgcgtaaagtgatgttaaataccttattcaccacatcctgcggcgcttcatcaaaagccaactcggaaggcaatacctgttcactctgagaaaaataatcttccagcgcactgcgtaagttacgaaagccgctaaaccccagcagcttacttaccttaactatcatcgcttcagataccgccagagcttctgcgacatctttaattgcgggtgcacaactcaggttaccgggtttgagtaaccactccacgatgcggctttcattttctgtcattccttcctgcttcattcgcaggtaaggcgctaaccctataccgttcggaagcgcactatcaaactcactctggctcatcacgttctcttgtccttgaattgaagacgccactatatcaccacagcaagaacagaaaagatgctggcgacttcacaaaaaaataaaatttataaagtttattttattgtgaacaatggcgagtggcttaaaattttatttcatttaattagtttaaaaacatgatgttatttgtttttctggttttttagatgatagatgttgctggatggtgagtgtctttaacgctattgcgctgtcagatgtaactctgtaaaacagatcaggaaggcgtaattcatcgattttgggtgtttttaattcattaacatcacaaatgttttttgattgtgaagttttgcacggacggggaagatgaatgaaaaagattgcatttggctgtgatcatgtcggtttcattttaaaacatgaaatagtggcacatttagttgagcgtggcgttgaagtgattgataaaggaacctggagcagtgagcgtactgattatccacattacgccagtcaagtcgcactggctgttgctggcggagaggttgatggcgggattttgatttgtggtactggcgtcggtattagcatagcggcgaacaagtttgccggaattcgcgcggtcgtctgtagcgaaccttattccgcgcaacttagccggcagcataacgacaccaacgtgctggcttttggtagtcgagtggttggcctcgaactggcaaaaatgattgtggatgcgtggctgggcgcacagtacgaaggcggtcgtcatcaacaacgcgtggaggcgattacggcaatagagcagcggagaaattgagattcatccactacttgcatggatgagtaatgattaatgtggatagagtttctttttgaggttggctaatgaaacgctttccgctatttcttttattcaccctgctcacgctgtccaccgttccggcccaggccgatattatcgacgacaccattggcaatattcagcaggcgattaatgacgcttataaccctgaccgtgggcgagactatgaagatagccgcgacgacggctggcagcgtgaagtgagcgacgatcggcgcagacaatatgacgaccgccgccgccagtttgaagatcgccgcaggcagctggacgatcgccagcgccagcttgatcaggagcgtcggcaactggaggatgaagagcggagaatggaagatgagtatgggcgatgaggttgggtatggagcaggcatcgcccctcaccccaatggggagagggagaaaacgagcgcaatattcaatatcgagcacaatcggtcccctcgcccctctggggagagggttagggtgagggggccagcgcgcacattccctctcatcacgccaccccaatctccatcccatcaaaccccacctcaaacccactcggtagtgcgttttccatcagccacgcatcaaactggtggctgatatgggtcagaatcacccgtgggctgcggataacctgattcagcgcaagcacggtatttaaatcacagtgattacgcggtgcatccgcgcgcggcgggtgactgcaatccatcaccattacctgcggctgattattgcgtaaaaatttcagcgttttttccggcaagcctgcggtgtcagacagccacgccacccggctgtgtgccgtttccagcagataaccgaaggtcagtttactgtggttgagcggcaggggcgtgacctgtaacccctgcaaatcaaacaccacaaacggttccaccgtgtggctgaaatcaagcaggcccggatgtttaaacagatcgtcgcagccctgttcatccggcgggccgtaaaccgggatcggatcgccaacgccccagcgcagcggaaacagcccctggacgtgatccatatgataatgcgtcagcaaaaactgctggaagcttccggggctccagcgatcggcgagatcgtgcagcccggcgtcgatcagggtgattgcgtcgttaaacttcactacgccgctgcacggttggcggcgatactgcgggctgcgccgcgctctggcgcaggccgcacactcgcagccccatgccggaacgccctgtgcgccgccggtgccggtgagcgtgagggtcaggctcatgttacagcgccttggtgaagcggaagtggctctgctcgtagccttcgcgcagatagaaacggtgcgcgtcgtggcgcttcacgttggtgctaagttcggtcatttcggccccggcctggcgggcttcttcttctgcccacgccagtaacttactgccgacgttcagaccgcgcgcctgcggcattaccaccaactcctgaatttcgccgatccagttgacatgatgcagatgaaactgcaaatgcaggccgatcatgccgacaacttcgccatcaagcagcgccagatggtagcgcatgtttgggtcgcgcagattggcgttaaaacccacgcgaaacgcgtggtggtcaaactccgcctgttttagctcacaaatcagcgcgtaaaccgcgtcggtgtcgtactgcgtggccgggcgaagctcacaagcaggcatggtgtttctccttctgatggatcagcgtcagcagcgtgtcgacgctctggcgcaggctgccgtcattgttgagcgtatggcaatcctgtggagtatagcgggcggcgcgcgccaggcgggcgttaatttcactggcgttttcacggccacggttttccaggcgctggcggaggatctccgggctaacctgtaaacagacgggcagcagcgcgctttgatagcgcgcccgcgcctgcggcagatgggcgcgactgccgttgaccagcacgtcgaatccggcgtgcagccagagatcaatctcgacgccgacgccataatacagaccgttagcgtgccagcttaaggccaacagattttgccccgcgcgggtaaaaaactcctgctcgctcagggcgatatggttttcacttccggcgctggcatcgcgcgtgatgtagcgatgcgccaccagtaactgagtttgttcccgcaggcggagttccgccagcaggctgtctttcccggagccggacggccccattaaccaaatcagttttcccatcatcagaacacccttttaccctgacgccagacgtggtcgatatgaatatgattgtccttgcgatgcgccagcaccaggtcggcgcgtttgccctcgccaatcaccccgcgatcctggagattaagcgcctgcgctggatttttagtcaccagcttcaccgcctgcggcagcgtaaagcggttgctctggtcatcggcgacgcgaaatgccgcatcgagcaggctggcggggtagtagtcggaagagaggatatccagcaggccaagctgcgccagttcactggccgccacgttgccggagtggctgccgccgcgcacaatattcggcgcgcccatcagcacgttcatgccatgcttgcggctggcttccgccgcttcgaacgtggtgggaaattcggcgatcacgctgccaagctggtgagattcagcaacgtgggcgtgggtggcgtcatcgtggctggcaagcgcaatttttcgcgcgcggcacagggcggcgatggattcgcgattcggctggctccagcgtgcggcgagcgccagttgctcttcttcgtactgctgcatctgcgcatcagtgagggagtatttgccctgataatattcgcgatacttctcgcggttggcgaactggcgctggcccgggctgtggtccatcaggctcaccagcgtcaccggctcgcgctgcaccagtttttcaaacagcggcagcgtggtgtgatgcggcagttcgcagcgcagatgcagacggtgctcggcgcggttgacgccgcgtttctgcgtctcttcgatggcgttgatcatcttctccagattctccagccgatcgccgccgtcgcgcacgtcgccaattgccacggcatccagtacggtggtgatgccgctcgccaccatcagcgcgtcgtggctgctcatcgcgctgtgggcaggccagtcaactttcgggcgcggggtgaagaatttatccagattatcggtatgcagctcaatcagccccggcagcagccagccgccttcgccgtccatcgcctccggcaggcggctctggctttcggcaaaggcgcggatttcgccgttctgcacctccaggctaccgcttaccacctcgttttccagcaccagcttaacgttattgataatcatgaagaggctcccattgggtgttagctcaactagaggctcccattgggtgcaggcggtcggcgacgtcattacgtacagcttcgtcatggaagatgcctacgatggctgcgccacgggttttggcttcgcgaatcagttccaccaccgcggcgctgtttttggcgtccaggctggcggtaggttcgtcaagcagcagaatggggtagtcgacgataaagccgcgggcgatgttgacgcgctgctgttcgccaccggaaaatgtgcttggtgccaggtgccacaggcgttccggcacgttcaggcgggtgagaagacgcgcggctttagcggcgcaggcttcacgcggaacgccggtatcgagcagcggctgcatcaccacttccagtgcactgatacgcgggatgacgcgcagaaactggctcacccagccgacggtggttttgcggatttccaccactttgcgcgctggcgcggtgaccaggtctacccactcgtcaccgtgtttgatctggatttgaccttcgtcgggcagatagttggcgtacaggctgcgtagcagagtacttttgccgctgccggaatggccgtggagcaccacgcattcgcccgcgttgacggtgaggctggcgcgattgaggacgggcaggcgcacgccgttttgctggtgcaggatgaaggttttactgacgttttgtacgttaatcatttttcgcctcgtggttcgggtgtcggatgcgacgctgacgcgtcttatccgacctacggggagcgcatttgtaggccggataaggcgtttacgccgcatccggcaccggctcaattctgcaaaacgctactcaccagcagctgtgtatacggatgatgcgggtcgtcgagcacgcggtcggttaacccactctccaccacttgcccctgcttcatcaccagcaaacggtccgccagcaggcgggcgacgcctaaatcatgggtgacaatcaccaccgcgaggttcagctccaccaccaggccgcgcagcaggtcgagcaggcgggcctgcacgctcacatccagcccgccggtcggttcatccataaacaccagcttcggatgcgtcaccaggttgcgggcaatctgcaaacgctgctgcataccgccggaaaaggtggtcggcaggtcgtcgatccggttggcgggaatctccacctcttccagccacttctgcgcggtggcacgaatatcgccgtaatgacgtgccccggtcgccatcagccgctcgccgatattgccgcctgcgctcacctggcggcgcaggccgtcgagtggatgctgatgcaccacgccccattcggtacgcagcaggcgacggcggtcggcctcgctcattgcatacaggctacggttctcgtagtgaatttccccctgctgcggcgtcaggcgcgcggagatgctcttcagcagcgtggtcttcccggagccggattccccgacaatgcccagcacttcccccggccataaatcaaaagagacatcgctaaagcctttgcccggcgcgtaaaggtgggtcaggttattgacgctaagtaacggttgattcattggttttttgcctcgctctgttggcggcaataatcggtatcggagcagacaaacatgcggtttccggcgtcatccagcaccacttcatcaagatagctgtgggtgcttccgcagatggcgcatggctcatcccactgctgaacggtgaacgggtgatcgtcgaaatcgagactttccacgcgggtaaacggcggcaccgcatagatgcgcttctcgcgccccgcgccgaacagttgcagggcgggcatcatgtccatttttgggttatcgaatttcgggatcgggctcgggtccatcacgtagcgcccatttaccttcaccggataggcgtaggtggtggcgatatgaccgaagcgggcgatatcttcatacagtttcacctgcatcacgccgtactcttccagcgcgtgcatggtgcgggtttccgtttcgcgcggctcgataaagcgcagcggctcggggattggcacctggaagataattatctgatcttcggtcagcggcgtttcggggatgcggtgacgcgtctggataaccgtcgcatcgtccgtacgttccgtggtgtttaccccggtcacgcgcttgaagaagttgcgaatgctcacggcgttggtggtgtcatccgcgccctggtcaatcaccttcagcacgtcgctttcgccaatcacgctggcggtaagctgaatgccgccggttccccagccgtacggcatcggcatctcgcgcccgccaaacggcacctgataaccggggatcgccaccgcttttaagatggcgcggcggatcatgcgtttggtctgctcgtcgaggtaggcaaagttgtagccgctcagattagccatggttctgctcctgttgcagacgtttgagtagctccagttcggcctggaaatcgacgtagtgggggagtttgaggtgactgacaaagcctgcggcttcgacgttgtcggcatgtgccagcacgaactcttcatcctgcgccgggcctgtcgcgtgctcgccgtactccggggcttgcagagcgcggtcgaccagcgccatcgccatcgctttgcgctcgctcatgccgaacaccagcccgtagccgcgcgtgaagtgcggcggctcacccggcgggtcgataaaaccgttaaccatttcacactcagtcatcagcagttcgccgacgttcaccgcaaatcccagctcttccggcacaatgctcacgtcgatatagccgctgcggatctcgcctgcgaacgggtgattgcgcccgtaaccgcgttgggtggagtaggccagcgccagcaaatagccttcgtcgccgcgcatcaactgctgcaaacgggaggagcgactgcaggggtaaaccggcggcgtgcgggtgatgtcatccggctgtgcgccgctatcctcttcaaacttcgccagcccctgacgcgccagcaggctgaaaacgtgcgggctcggctgctgttcgctgtcggcggtggtcagcgtcggcgcttcgccgtttgccagcagggtaaaatcgagcaggcgatgggtgtagtcgtaggttgggccaagcagctggccgccgggaatgtctttataaacggcggagatacggcgttcgagacgcatcccggtggtgtcgagcggctcgcttaccgccagcttcgccaacgtggtgcggtaggcgcgcagcaggaaaatcgcttcaacgttatcgccgctggcctgtttcagcgccagcgccgccagttcgcggtcggcaatgccgccttcggtcatcacgcgatctaccgcgaggttaagctgctgttcaatctgggcgacgctcagttcgggcaaatcggtatcgcctcggcgtcggctctcttgcagggcgtgggcggcgtcgatcgccttctcgccccctttcacggcaacgtacatcagcacacctccacatgagtggttcgcggaatagccagcaggcgctcgccacaggtcaggatcaggtcgatgccgagcgggaacggatgcgggcgctcggtgagttcgtgcagaatgcactccggcagctgcggagcgatcattcgttcttcggcaatacccgcaccagtaaggcgcaacatgcgtccgccgctcaggctggcgacctgtaaaatcagcgtcgcacccgcttccggcgcaacggcggtgccggtggaaagggcgttgagctgttcgctggaaatcgcctcatccgtcaccgcgaaggtcgcctgttccggctggctgaccagcggcgcgttggtatgaaaacgcaggctctggttgacgatatcgttatttaatggggtagaaagccacaccggcgtgtcgttatcggccagcgtcagcagcacgctggtggtggcgatattcagcggttgccagccgcgtttgagctgatgcagggcgacaatcacgcccggctcgctcatggcctttaacaggcgacgaaaactgtgctgggcatcctgcacgggaagcataaaagcggtttccagggtcatgcgttgtctccgcgaaccatcgtaaagaagtcgacccggctggcgttcacttcggcctggcgtgcggcaatgcgtgccatacggtcagcgtccagcggggcaataagggtttcacttaagttttgaaagtggcgagattgctgcatcagcgcgtcaatcagcgcgcagcgttcggcgtgctgtttatcacgcccctgcacccagctgtagccgagcgtgccgtcagtcaggcgcacggcggcgcgggtcagcgtggcgtcgccggcaaaaaaacgttcgccggtgccgcccatccgcgcctgaatctgtaccaggccagtttcagcggcgcggatcacctcatagtcggcggtgatgtttagcgcgttcaggcgtgctgccagttcagccggttggctgtgcgccagcacggacatccagtgctggcgggtcgcggtatctgcgtgcattcagtgctccatagtgaattcaatcatgtcggcgcgcgtcaggctgacggagtactccgccgggctgctttcaccgtcacggtggttaagggtgcgcacgcacagcagcgggctcatattcgggatttcaagacgctggcactctttggcctgggcgcggcgggcgctgatccgcgtctggctgcggcgcagcgcaattccggtttgctcgcgcagaaaatcgtgcaggctgccgctgtcgaagcgttgcagcgtcggccagagggtgaggtccgcgaagtagtggtcgattaaacagagcgcgacgccgttgacacgacgcagggtgcgcaggtggatgacgttctccccctcggtaatccccagtgcgtcagcgacgtggccggacgcggggcgcaatacgctaagcagtttttcgctggtgggatggctgccctgatccagcagattctggctaaaacgcgcctgggcgttgagcgggtaatcgaacgggcgcatcagcaccagcacgccgacgccctgacggcgctgtacccagcctttttccaccagttggtcgatggcgcggcgcagggtgtggcgattcacctcaaagcgcgctgccagttgctgctcggcgggaagatagtcgccgcagcggtagtgttgacgaagctcctgctcaagttttgcggctatctcttgatagcgtgttgggtagctggtcggatgtgtagacaagtgcatagatatcaatgcctcgcttatcagataaagtgcttacgcaaccgttgagagaggaaatccagcaggctgaccgtgacgatgataagcaccatcagggcgcaggtttgttggaactggaaaccgcgaatcgcttcccacagggtgacgccgatcccgcctgcgccgaccatgccgacgacggtcgccgagcggacgttggattcgaagcgatagagggagtaggagatcagcagtggcatcacctgtggcagcacgccgtagaggatctcttcgagcttgttggcaccggtggcgcgaatgccttccaccgggccgggctcaatcgcttccaccgcttcggaaagcagcttggagagcacgccggtggtgtggataaacagcgccagcacgccagcacgccagcgaacgggccgaggccgacggcgaccacgaacagcatggcgaagaccatttcgttaatggcgcggcaggcgtccatcaggcggcgaacgggctggtaaacccaccacggcaccaggttttcggcgctcatcaggccaaaggggatggagagaaccaccgccagcgcggtgccccagacggcgatttgcagcgtgacggccatttcggtgaggtaatcctgccactggctgaaatcgggcgggaagaagtcggcggcgaacgtcgccatgttgccgccgtctttgatcagcgtaagcggggccatttccgcgccctgccacgagacgaccaacacggcgagtacaacggcccagctcagaagcgagaaccagctgcgcttgggtggggcgatggtgatggtttgcatgtttggctccggtctgtaggccggataaggtgcttgcaccgcatccggcatcaacgcctgcacattgtcggatgcgacgccggggcgtcttatccgacctacgatttactgcaccgctttactcacgctactcatcgcgcttagcgcgttgttcaggcggtccaggtcatccagctgcgcctgaatctcggtggtttttgccagcttgtcctgctcattcagtcctttattgcttttcacgccctgcatctctttaaacagcgcgagctggcgaatcggcaccagttgcaggtcgctggaagcgcggaatggcgcccagcccaggcgttccagcaccgctttttcttccggcgttttgccgtagttcataaagaagtcgtagatcttgtctttggtggtttcggaaagattcttgcgccagacgatcggatcgcctgggatcagcgggctcttccagatcaccttcagttctttcagcttctctggcgcggaggttttcagcttgtcgaggttttcggtgttgttggtggcaacatccacctgcttgttggcgacggccagcgcgttggtttcatgcccggcgttgacggtgcgcttgaagtcgctggcggagatattgtttttggcgaagacgtagtagccggggacgaggaagccagaggtggagttaggatcgccattgccaaaggtgagatctttccgcttcgccagcagatcgttcaggttgttgatcggactgtctttgttgacgatcaacacgctccagtaacccgggcttccatccgccgcgaccgtctgggcgaagacctggccattggcgcgatccaccgcttccatcgcgctcagattgccgtaccaggcgatatccactttattgaagcgcatcccctggataatgcccgcgtagtccggggcaaagaaggcgttgaccttcacgcccagcttcttctccatatcctgcaagaacggcgtccattgcggtttcaggttttgctgactttccgtactaataatgccgaaattcaacgccttttcctgctcttcggcgtgcgccgggcttaacagggtgctgaggctgaacatgctggtgaaggccaggctggcaattatcttagcgttcattcgttttcctcaatgatggggatgtcaggcagctttcgcgttctcttcgacgcggttaatgctgcggtagagatggtcaaaacgttcgttatcaaactgttggctgctgccgtcgtagaagacgtgcccctggcgcagggcgacgatgcgttcgcagtagcgcagggcgtaatccacctgatgcagcgtgacgaccacggtgatgccgtcgttctggttgatgtcgcgcagggtgtccatcacgatgcgcgcactttctgggtccaggctggcgatgggttcatcggccagaatcactttcgcctgctgcatcagcgcacgggcaatcgccacacgttgctgctggccgccggagagggtggaaacgcgctgatgggcaaaatgcaccatgccaacgcgggtcagcgcctgtaacgcgcgctgtttctgctcgccggtgaaccagctaaaacaggtgcgccagaacggcgtgctgccgagcgcgccaatcagcacgttctccagtacgctcaggcggttcaccaggttgaattgttggaatatgtagccggtatgggcgcggcttttgcggatatcgcgggccaggcggccttcgcgctggactgtgcggcccagcagctcgatatggctaccgacagatttatcgccggtaatcaaaccgcttaagtgacgtaaaagggtggattttccggaaccgctcggcccaagcagagccaccatttcaccgtgatgaatgttcagatcaaccgcatgcagcgcctgatgctgattgaaggttttggcgagcttctcgacacggataatcgtttgcatgatgcagcctccctaaaaaagtggctccatcgtggcggattattgtgacgatttggttaattaaaagtgactaacagatgaagagttaacgggaattcgatgacagtgcgggagggcgggcctcccggcgggttattgcgttggttgttgtttgacgacattaatcatccacggtacgccaaatttatcggtgactttgccaaagccatgcgcccagaaagtttcctgccaggccatttcgatttttccgttagcggcaagattgtcaaaccagcgttttccttcttcgacctgttggctatcgagcaccagcgtaaagccggagtagctggcttttccactcggcatggcatcgctcatcatgatgtcgcttccggcaatgcgcacattggcgtgggcgatggcggtatcgggaaattgcattccggaagggcagttctcggcgctgtcctgcgcactttttggcatttcgccgaagctgattttatagagcagttccgcgcccaacgtacgttgataataggcaatcgcgtcggaacagttaccggcaaaagagaggtagggacttaacggcatgatggtgacctcagttaagagaagccagttaagtgtagttcgaaatttatacagatgagaggcggcctgataagacgcgcgagcgtcgcatcaggcagtcggcactgttgccggatgcggcgtaaacgccttatccggcctacggagggtgcgggaatttgtaggcctgataagacgcgcaagcgtcgcatcaggcagtcggcaccattgccggatgcggcgtaaacgccttatccggcctacggagggtgcgggaatttgtaggcctgataagacgcgcaagcgtcgcatcaggcagtcggcaccgttgccggatgcggcgtaaacgccttatccggcctacggatggtgcgggaatttgtaggcctgataagacgcgcaagcgtcgcatcaggcagttggcactgttgccggatgcggcgtaaacgccttatccggcctacggagggtgcgggaatttgtaggcctgataagacgcgcaagcgtcgcatcaggcagtcggcaccgttgccggatgcggcgtaaacgccttatccggcctacggagggtgcgggaatttgtaggcctgataagacgcgcaagcgtcgcatcaggcatctggcaccgttgccggatgcggcgcgagcgccttatccggcttaccgatcacaatacaatcagttctttttcacaaactcagatttcagtttcatcggaccaaaaccgtcgattttgcaatcgatgttatggtcgccttcaaccaggcggatgtttttcactttggtgccaattttcagcatgctagagctacctttcaccttcagatctttaatgatggtaacgctgtcgccgtcagccagcagattgccgttagcatctttaacgatcagctcgtcgctttcctgtgcaggttctgcgtcgttccattcgtaggcacattccgggcagatgtacatgccgttatcttcgtaggtgtattcggagttgcattttgggcagtgtggtaaactcatgtggatttcctcaaaagtcagcagggcaaaagcgccaaaaaacggcagattgccgaaaaaggccgcaattatacacaaaatccctgagtttgtcgggggtactgctgattttagacgacgatcgttttcatttgaaaggaaacgcaaaaagaaaataatctttttgcctctatttattatttaagataatgttaatgctctacttgttctttttttaattcacatgatatttttatctttctgacgttttaaacgtatcagaagacgttatttattctgataaaaaacaacacactaaatataaaattatttcttgcagtaattataaaagccgaaaacagaactcaaaaacaatctggctaaataaaataacaaaatttgctttaaggaagaattttctatgtacacacagaccctgtatgagttaagtcaggaggctgaacgcctgttacagctttctcgccaacagttgcagttactggaaaaaatgcctctctctgtacccggagacgacgcgccacaactggctttaccctggagtcagcctaatatcgccgaacgtcacgcgatgctgaataatgagttgcgtaaaatttcccgactggaaatggtgcttgcaattgtcggtaccatgaaagcagggaaaagtaccaccattaatgccattgttggtacggaggttctgcctaatcgtaatcgcccaatgactgcgctgccgacgcttattcgccatacgcccgggcaaaaggaaccggtactgcattttagtcatgtcgcgccaatcgattgtttaattcaacaattacaacagcgcctgcgtgattgcgatattaagcatctgaccgatgtgctggaaatagataaagatatgcgtgcgcttatgcagcggatcgaaaatggcgtcgctttcgaaaaatattatctgggtgcccagcctatttttcattgtctgaaaagtttgaatgatttagtgcgactggcgaaggcgctggacgtcgattttcctttttctgcttacgccgccattgagcatattcccgtgattgaagtggagtttgtccatctagcggggctggagagttatcccggtcagttgacgttactggatacccccgggccaaatgaagccgggcaaccgcatctgcaaaaaatgcttaaccagcagctggcacgcgccagcgcggtactggcggtgctggattatacgcaactgaaaagcatctccgatgaagaggtccgtgaggcgattttggcggtggggcaaagcgtgccgctgtacgtgctggtcaataagttcgatcaacaggatcgtaacagtgacgacgccgaccaggtgcgggcactgatttccgggacgctgatgaaagactgtattacgccacagcagatatttccggtgagcagcatgtggggctacctggcgaatcgggcgcgctatgagttagccaacaacggtaagttaccaccgccagagcaacaacgctgggtggaagattttgcccatgccgcgcttggcaggcgctggcgtcatgccgatctggcggacctcgaacatattcgtcatgctgccgatcagttgtgggaagatagcctgttcgcccagccaattcaggcgttgcttcatgccgcttacgctaacgccagcttgtatgctctgcgatctgccgcgcataaactgttgaattacgcgcagcaggcgcgggaatacctggattttcgtgcgcacgggttaaacgtcgcttgtgaacaattgcggcaaaatatccaccagatcgaagaaagtttgcagctattgcaactcaatcaggcgcaggtgagcggcgagattaaacatgaaatcgagctggccctgacctccgccaaccactttctgcgtcaacagcaagatgcgctgaaggtgcagttagccgccttgtttcaggatgatagcgagccgttaagcgagattcgtacccgctgtgagacactgttacagacggcgcagaacaccatcagtcgcgactttacgctgcgttttgccgagcttgaatccaccctttgccgggtgttaaccgatgttattcgccccattgagcaacaagtcaaaatggaattgagcgagagtgggtttcgtcctgggtttcattttcctgtttttcacggcgtagttccccacttcaacactcgccagctgttcagtgaagtcattagccgccaggaagcaacggacgagcagagcacgcgtttaggcgttgtgcgtgagacttttagccgctggttgaatcagcccgactggggacggggaaatgagaaaagtccgacagaaacggttgattacagtgtgttgcaacgagcattaagcgcagaagtcgatctctattgccaacaaatggctaaagttctggcagagcaggtcgatgaatctgttacggcaggcatgaatacttttttcgctgagttcgctagttgtttgacggaattacagacgcgtttacgcgaaagtctggctctgcgtcaacaaaatgaaagcgtggtcaggctgatgcagcagcaattgcagcagactgtgatgactcacggctggatttacaccgacgcccagctgttacgcgatgatattcaaacacttttcacggcagaacgatattgaccaagacgttacttgacggccccggtcgcgtgctggagagcgtttatccccgctttttagtggatctggcgcagggtgatgatgcccgccttccacaagcccatcagcagcagtttcgtgaacgactgatgcaggaacttcttagccgtgtgcagcttcagacatggacgaacggcggcatgttaaatgcgccgcttagcctgcgtctgacattggtggaaaaactggcgagcatgctggatcccggtcatctggcactgacgcagatcgcgcagcatctggcgctgctgcaaaaaatggatcaccgccagcactctgctttcccggagctcccccagcaaattgccgccttgtatgagtggtttagtgcccgttgtcgctggaaggaaaaggcgttaacgcaacgaggcctactggtgcaggcaggtgatcagagcgagcaaatttttacccgctggcgtgctggggcgtataacgcctggagcttgcctgggcgctgttttatcgttctggaggagttgcgctggggggcatttggcgatgcctgccgtctgggaagcccgcaagcggtggcgttgttgctgggtgatttgctcgagaaagcgacacaacatctggcagagagtatcaatgcggcaccgaccacgcgtcactattaccatcagtggtttgcctctagcaccgttccgacgggcggggagcatgctgattttttaagttggctgggaaagtggaccacggcagataaacaacccgtttgctggagtgtgacccaacgctggcaaactgtcgcgctggggatgccacgactctgtagtgcgcagcgtctggcgggggcaatgctcgaggaaatcttctctgtaaatttggcgtaaataatcagttacatcaatgagtcctaaacgaaatccatgtgtgaagttgatcacaaatttaaacactggtagggtaaaaaggtcattaactgcccaattcaggcgtcaactggtttgattgtacattccttaaccggagggtgtaagcaaacccgctacgcttgttacagagattgcatcctgcaattcccgctccccttttgcggccgtcgcgctgatttttctggcgtttgcggaaatgggccaactctgcgaggaaagctatgctgaaaaggaaaaaagtaaaaccgattacccttcgtgatgtcaccattattgatgacggtaaactgcgtaaagccattaccgcagcaagtctgggtaatgcaatggaatggttcgattttggtgtttatggttttgttgcttacgcattaggtaaagtttttttcccgggggctgaccccagcgtgcagatggttgctgcacttgccactttctccgttccctttctgattcgaccgcttggcggactcttctttggtatgttgggcgataaatatggtcgccagaagatcctcgctatcactattgtgattatgagcatcagtacgttctgtattggcttaataccgtcctacgacacgattggtatttgggcaccgattctgctgttgatctgtaagatggcacaaggtttcagcgtcggcggtgaatataccggggcgagcatatttgttgcggaatactcccctgaccgtaaacgtggctttatgggcagctggctggacttcggttctattgccgggtttgtgctgggtgcgggcgtggtggtgttaattagcaccattgtcggcgaagcgaacttcctcgattggggctggcgtattccgttctttatcgctctgccgttagggattatcgggctttacctgcgccatgcgctggaagagactccggcgttccagcagcatgtcgataaactggaacagggcgaccgtgaaggtttgcaggatggcccgaaagtcagctttaaagagattgccactaaatactggcgcagcctgttgacatgtattggtctggtaattgccaccaacgtgacttactacatgttgctgacctatatgccgagttatttgagccataacctgcattactccgaagaccacggggtgctgattattatcgccattatgatcggtatgctgtttgtccagccggtgatgggcttgctgagtgaccgttttggccgtcgtccgtttgtgctacttggtagtgttgccctgtttgtgttggcgatcccggcgtttattctgattaacagtaacgtcatcggcctgatttttgccgggttactgatgctggcggtgatccttaactgctttacgggcgttatggcttctaccttgccagcgatgttcccgacgcatatccgttacagcgcgctggcggcggcatttaatattagcgtgctggttgccggtctgacgccaacgctggcggcctggctggtcgaaagcagccagaatctgatgatgcctgcctattacctgatggtagtggcggtggttggtttaatcaccggcgtaaccatgaaagagacggcaaatcgtccgttgaaaggtgcgacaccggcggcgagtgatatacaggaagcgaaggaaattctcgtcgagcattacgataatatcgagcagaaaatcgatgatattgaccacgagattgccgatttgcaggcgaaacgtacccgcctggtgcagcaacatccgcgaattgatgaataagctgaaacggatggcctgatgtgacgctgtcttatcaggccaattgaactcttaaggttcacttaatctctgacgcgcatactctcctccaggttaacggaggagagtgcaatgaaaaaccgtgtttatgaaagtttaactaccgtgttcagcgtgctggtggtcagcagctttctttatatctggtttgccacgtactgatctttcttcagccgtacccaggcccgcgtgccggaagtctcttgccggttttgcaggaaaaactgcccgtgatgcaactgtgtaatgcggctgacaatacttaaccccagaccaatcccgccataacggctgtccatacgtacaaacgctttactcaactccccgcatttactctcatcaatacctggtccttcatcttcaactgccatgaccgctccgtcatcttcttgcagcttaatcataatgttgctgccttgcgggctgtaacgatgggcgttttctaccaggtttcgcaataacatccgcagcagggttgcatcaccctgaacggtgatgtcggcggcgctctctggcaatagcagggtttgctgtcgctggtcgagcatggtactgagttcgtcatagctggggagaatgacatcttccagcagttttacatgttgataattaccggaagaaaaactctgtccggcacgcgccagttgcagcagctgggagacgctctccatcatctgatcaagccgtgccactaacggtgctacatcaatgtgatgcgttttcgccagcagttccagatgcaaacgcacccccgccagtggcgttcgcagttcgtgcgcgacgtcagcggtaaacaacctttcgttatccagcgtgctggtcaggcgactgaccagatcgtttaacgcgctaaccaccgcttcgatttcgagggtggcgctgtgaatggcaatgggcgttaagttgtcggcggtgcgcgcttccagctctttttgcagctccgccagcgggcgggtgatgcggcgtaccgcctgatagcagataaatagcgtcaggctgaccataaagacgccggggacaatcaggctggcgaccgcctcgcggatctcacgcatgatgtggcgatcgttgttgcgattgtcgcgtagcgcctgctcaaacagctgaatctgctcggtactttcatgccatagccagaagacgctgatcagctcaaacaccaacaaaatggccccgatggtcaatatcagccgttggcgcaggcttattggtcggcgcagaaaatgcatcagattcaattagttttcctcattcgcgaccagcatatagccaaagccgcgcacggtgcggatacgggctttgcccactttgtcgcgcagattgtggatatgcacttccagggtgttggtgctgggttcattgtcccagttatagatgtcgttgtagagaatttcccgatgcaccggactgcctgctttgagcattaaccgactcagcagagcatattctttgggcgtcagaatcaactcttcaccgcccatccatacctgacggcgacccatgttcagcgtcagattgccaacaatcagctcactttcgccctgattattatggcgtcgtagcagggcgcggatacgggcatgtaactcttccagcgcaaaaggcttcaccagatagtcgtcggcaccgacatccagcccggcgattttgtcggtcagcgtatcgcgagcggtgaggatcagtaccggcagggtatattttttctgccggatacgggcgagaaaatgcagtccatcttcgtcgggtaaccctaaatccagtaccaccaggctgtaatgacctgcctcaaggctttgttccgccatccgcgcggttgtcacgctatcgcacgcgtagccttcggtttgcgccgccagaatcagtccctgcaataacagcgtatcgtcttcaacaatcagaattttcattcactcactctcctgcaagtttgcagaatatcatccgcagcctggtaatacttcgtctcaacgccagttaatcccaatagcgtggagaataaattgtcttgactatagtgttgcgtttgcgcctgtttttgcaggcagttctggtcaacctgataccgtttttgataatcctcgctcagccacagcagcatcggcacctgtttttggctatccggggcgatggcataaggcagaccgtgcagatagatgccattttcacctaagctttcaccgtggtcagaaagataaaccaggctggtggtaaatttatcctgatgttctttcagcagattaatcgctttatcaacaatatagtcgacgtaaaccagcgtgttgtcgtaagtgttcaccagttgctctttggtacaggtctggatctcattggtgtcgcaggttggggtaaatttcctgaactgaggcggatagcggttgtaataggtcggaccgtggctgccgatggtgtgtaagacaatcacgccatcaccttgcaggttattgatgtactcttcaagcccgtggaacagcacttcgtcatagcattcgccgttgatgcactgatcaggtagattcagcgcggtgacgttctggtgaggcacgcggtcgcaggcacctttacagccgccatcgttgtcattccacagcacgttgatgcccgctcgctgaatgatatccagcacgccttcctggtgctgtgccagctcttctttgtagtgctcacgcggcatatcgctgaacatgcacggtacactaactgccgttgccgtgccgcaagatgcggtattagggaaatagaccacgttatctttcgccagccgcgggttagtttcacgcgggtagccgttgagggagaagttctccgcccggctggtttcgccgacaatcaggatggtcaaatttttacgtttttcgttctgcattaacgggttgcggtgcgcgtcttcaccaattcgcaccagcggcagatttgccagtcgctgatgggagtaccaactccagctggcaacaatgctgttagaggggcttaaggatttcaccagctctttgttattgcggaacaagctggcgtagtctttataaaacagtgcggcgaccagcaaaatcagtagtacagaaaccagaatattggctccacggaaaagaacactgcgcagacggctggtggcaggtttgatttttatccagcaggcaatcagcgcagcaagcacgccgctgaatcccagcgttaataacatttgcggtgtcatcagcgcataactttctgccggagtggtatcaataatattggcaatcatgctgcggtcgatgacgatgccgtaagtcattatgaaatattgtgcagccgcgccaaccagaataaacaggcaggccagtggtcgattaagccataagaaagagcttagtgtcaggacaatattaatcacgctgaaagcgacgaccggcatgctcaagaaaaccagtacgttatgcaggctatccagcggcagcgcctgcaacacctgtttaaaaaaggcaatattcaggcagatagagatataaaaagcggccaacaatagccaggcgagtaaattcaaagagggtctttttagtaggcgcttcaacatcacggtgtttccatcgaacaaagtgcgcatatgctcgcaaagcaaaattaagccaaccttaagttcttaaggttggcttttatgtttgctggattaaggggaattaatctttgcttattggtgcatctaagggatacgggtttttatgtagccggttgtaattcagcgcatacatggcggtgatgaccatcagggtgacaaaactccacataacctctttcgctccggaccccaccacggcccagatgcagtagaggaaggcaatggtagtaactgccagatatgccgggcgtgctttaccaaagtgaccgtgtccgagcagcagtaacgccgcacaggtgtaaagatatggcaccagtgtaaagatgacgctgacggaagaaaccagaccgaactctttggtcgcgtttggactaatgctgctgagctggaagatggtcatcaaaataccgacgataatcagccccgccactggcgtacccgctttatttacacgggcaaaaatcggtgggaacagtccgtcatcggcagcggctttcgccgtttgacccgccagcaacgtccagccgcccagactacctaagcaacccgcagctgcgcagaaggaaacaatggccccggcggtgtcacccaacgccatccgtgcggcatcaccgaatgggctagcagaaacgcgcagtgcggcattagggatcatccccataatcgcggtggtagaaagtacatagcaaacggcggcaatcaataccccaccaatggtggcgatagggacattgcgtttcgggtttttcaccacacctgcggcaacggaggcactttccacaccgatgaagctccacagcgtaacgttaagggtactttgaattgcaccgaaggtgcccaggccgctgacgttccatgccgccatataggtttcaccacggaaccagaaccagccaaatacggcaatcccgacgatggggatcagcgccagcacggtggcaactgcctgcacacgggtgatcattttcggaccgacaatgttcagcaggacgaagatccacagcaccacgacgcaggtgatggttaataccaatggatctttcagaatcgggaagaagtaacttaaatatcctacgccaatgaccaccatggcgatattgccgatccagcaggccagccagtagaggacgttggtttgataaccgagaaacgggccaaagcagcggcgggcgtaagcgtaagaaccaccaggacttgggtcgaggaagctcattttggcgtataccatgctgagccccagtgcaccgataatcgtcaccaaccatccataaatggcaatcccgccagtagaggccaggtttgcaggtaacagaaaaacaccactccccataatattcccgctcaccatcagggtgacggggattaagcccactttgtgagcatcagcatcgctagacataattaaactcctgcgaaggcgagcttcgtgacaataaattacgtcatatcatacgcctgcattcgatagttgaattattatcgaccgggttatcgctgatgccgttattaatatagctcttcgttaaggttaaaaatcaggcgacagtgcgttctctgtgctgactaacataatgcagcggcgtcataccgtagaagtctttaaagacagaaataaagtagctcgtactgttgtagccgcaggactgacttacctgagagatatttttaccgtccatcattaattcatttacggcataacgcatgcggcaggtggtgattatttggctataactggtgttttcgcttttcaactttttctttaacagacttgggctaagacataaacaactggctaccatactaagattccagtctttgtgaatatcgctttcaataatttgataaacgctgtcacttacacaattacgtaacatatacatcattaaactaacgaattttttactgtcgagaaaacgggatagcaccgtgaataataatgcgcgtgttcgttccttttcactctcagtttctgcgggcatcatgctgtgttgcgcggcaacgcgaaagacgtctggcgtcaggcatggcagggtgagtatgggcgtagcgctacgttgccatactggtatttggctgagatctttattcagaaaccggaggtaatctttgatgatgtcgtgactaatatgagcaaccaaagtgttgttaagagaggagacgtcgataatattattttcacaatttaataacgccatatggttagctttaaggctaataggttctttcccattcacccttatccagacatctttttcagtcaataaaacaatacaaggttggtcgctgcaaatcctcatacatgtactcctgagtgcgaataaaagaccagttctcgctaaagcaaagcgataccgggaaatggttatataattgtatgatgaatataaacatgcataaaaataacgagttttactaatagtacaaatttttatagtaatttctcatgtacatatttttttacaggataaataacaggcaaaaaaaagcgcggggtggggccgcgcaaaaagtatgacatttttgtttgcagcaatttttatgaaaacgttgccatactcaaaaggcctaaggccaggcggcgtaatgttatttaaacaattacgccttcagcggaatagtggttacgctttcacgcacataacgtggtaaataccgtcaataatttcagtcccttcagtttcgtgttcaaatccagggaaatggtggtcccaggattgcaggctgcgtaaataacttacttgcggactgtttttatcgccgaagttttcaccagacagcagcatcgggattcctggcggatacgggataacactgtttgccgcgatgcgtcctggcagattttcaatggataccagttcgacattgttgtcgacaatcgcgttgtacgcttcacgcggggtgacttccgccaccggcaggccggaataggcttcgttcaaccgtgcgccagggttgttttctttcagccaggcaaacatggtgtcacccagatcgtgaatccccatgttcgcgtaagtgtcaggatattgttcaacaagttccggcatcacctgcgccagcggtgtgttggcgtcatagtggcgtttgaaggagcaaagggtgttaaccagagttccccatttcccacgggttacgcccatagagaacaggaacataatttggaagtcagtggtgcgggtaggtacaatgccgtggcgaccaagccaggcagtgaccagcgccgccggaacaccggtttcttccagttcaccatcttcacccattcccggagcaaggatgctgactttaatcgggtcgagcatactccagttatccggaatatctttgaagccgtgccagctttcgcccggatgcattacccagcagtcctgaacggtggtcagcagtttggttggtgcgtcagcaaagtcataggttttgccggtttgtgggtcggtgacgacttctttgttccacggtttgaagaaccagctaccgtcagcggtgaactctttatatagccgcgccatcgcctgacggaaatcaaccgcttcgtcaatcacttcctgtgtcagactcaggccgctgttgccgtccatcatgctcaccgccacgtcgttggatgcgcagatggcatacagcggggaggtggtggcatgcatcatgtaggcctggttgaagcgggagaagttaatcgccccacgaccttcacgtacatgaatataagaagcctgactcagcgcattcagcagtttgtgggtggagtgggtggcgaaaacggtaggaccgttgtgatcgccaggttcgccgcgcatggcatagtgatcggcatagatcgggttgaaacgtgcatagccgtaccaggcttcgtcaaagtgcagacgatcggaggttttttccagcagatcctgcgcttctttagcgttataacacacgccgtcataggtgcagttggtcaccacgcagtaagacggtttttgcccggctttgtctttggtcagcgggctttcactgattttcttctgcaaggtttcaggttgcatttcctgcggatagattggcccgataatgccgtagcggttgcggcttggcaccatatagaccggtttcgcgcctgtcagcatcaaaccttgttcgatggatttatggcagttacggtcaacgaccacgacatcgttatcggtcatgcaagcctgcatgatggtgcggttagagccggaagtaccgacgactacgctccaggagcgatcggcaccaaatacgcgtgcggcatatttttcgctttcgccaaatgcgccagtatggtcaagcaaagaaccgagggaagttcgttcgatgcccatgtcggtgcggaacagattttcaccatagtagtcatggtagaaacgtccggcgggtgttttggtaaaaccaacgccgccctggtggcctggcgctgcccaggaatattcatggatgtcactatatttcatcagcgcgctgaacagtggcggcaacagctgctggcggtagcgggtcatcgcggcaacggcgcgtccggcgataaagtcggcggtatcttccagaatccaggcgaattcatcgacaagctccagcaggtcgcgatccattgcggcgagggctttttcccgatcgcccaacaggaagaccggcacgttttgttggcgctcatgaagcttaccgatcaattgtctgacgttttgatgttcgtccggatgttccatttgatagctgaacatcaggcagtcaatggcttcgttactagagagaatggcaaaaccatcatcaaaggaggtggatttaatcacggtaacattttgctggcttaaagcatctgccagacgctcaacggcgttaccgacccaggtgtcttgatggagaaactcgctttcaacaattaatactttcatcattgcttacccggttatgaaggaatcttcgttgcgggcaagtatcttccggccttttcgggctgtaaagcgcgtgaaaaacaaacatttttgaaatatttagttttataaacaatacgttatgtgattattttaaattattttcactgcttattatcgacggctaaactatttttttggctgatactgatatcgtctttagccgggaaacgtctggcggcgctgttggctaagtttgcggtattgttgcgggctcatgccgacatatttgccgaacgtgctgtaaaaacgactactactacgaaagcctgccgtcagggcaatatcgagaatacttttatcggtatcgctcagtaacgcgcgaacgtggttgatgcgcatcgcggtaatgtactgtttcatcgtcaattgcatgacccgctggaatatccccattgcatagttggcgttaagtttgacgtgctcagccacatcgttgatggtcagcgcctgatcatagttttcggcaataaagcccagcatctggctaacataaaattgcgcatggcggctgacgctgtttttgtgtgtgcggctggttttattgaccagaatcggttcccagccagagaggctaaatcgcttgagcatcaggccaatttcatcaatggcgagctggcgaatttgctcgttcggactgtttaattcctgctgccagcggcgcacttcaaacgggctaagttgctgtgtggccagacttttgatcaccatgccgtgagtgacgtggttaatcaggtctttatccagcggccaggagagaaacagatgcatcggcagattaaaaatcgccatgctctgacaggttccggtatctgttagttggtgcggtgtacaggcccagaacagcgtgatatgaccctgattgatattcactttttcattgttgatcaggtattccacatcgccatcgaaaggcacattcacttcgacctgaccatgccagtggctggtgggcatgatatgcggtgcgcgaaactcaatctccatccgctggtattcgctatacaggctcagcgggctgcgggtctgtttttcgtcgctgctgcacataaacgtatctgtattcatggatggctctctttcctggaatatcagaattatggcaggagtgagggaggatgactgcgagtgggagcacggttttcaccctcttcccagaggggcgaggggactctccgagtatcatgaggccgaaaactctgcttttcaggtaatttattcccataaactcagatttactgctgcttcacgcaggatctgagtttatgggaatgctcaacctggaagccggaggttttctgcagattcgcctgccatgatgaagttattcaagcaagccaggagatctgcatgatgtctgcacccaaaattacatttatcggcgctggtagcacgattttcgttaaaaatattcttggtgatgtgttccatcgcgaggcgctgaaaacggcgcatattgccctgatggacattgaccccacccgcctggaagagagccatattgtggtgcgtaagctgatggatagtgcaggggccagcggcaaaatcacctgccacacccaacagaaagaagccttagaggatgccgattttgtcgtggtggcatttcagattggcggttatgaaccttgcacggtgactgatttcgaggtctgtaagcggcatggtctggaacaaaccattgccgatacgttggggccgggcggtattatgcgcgcgctacgtaccattccgcatctgtggcaaatttgcgaggacatgacggaagtctgccccgatgccaccatgctcaactatgttaacccaatggcgatgaatacctgggcgatgtatgcccgctatccgcatatcaaacaggtcgggctgtgccatagcgtgcagggaacggcggaagagttggcgcgtgacctcaatatcgacccagctacgctgcgttaccgttgcgcaggtatcaaccatatggcgttttacctggagctggagcgcaaaaccgccgacggcagttatgtgaatctctacccggaactgctggcggcttatgaagcagggcaggcaccgaagccgaatattcatggcaatactcgctgccagaatattgtgcgctacgaaatgttcaaaaagctgggctatttcgtcacggaaagcagtgaacattttgctgagtacacaccgtggtttattaagccaggtcgtgaggatttgattgagcgttataaagtaccgctggatgagtacccgaaacgctgcgtcgagcagctggcgaactggcataaagagctggaggagtataaaaaagcctcccggattgatattaaaccgagtcgggaatatgccagcacaatcatgaacgctatctggactggcgagccgagtgtgatttacggcaacgtccgtaacgatggtttgattgataacctgccacaaggatgttgcgtggaagtagcctgtctggttgatgctaatggcattcagccgaccaaagtcggtacgctacctagccatctggccgccctgatgcaaaccaacatcaacgtacagacgctgctgaccgaagctattcttacggaaaatcgcgaccgtgtttaccacgccgcgatgatggacccgcatactgccgccgtgctgggcattgacgaaatatatgctcttgttgacgacctgattgccgcccacggcgactggctgccaggctggttgcaccgttaaaacgcgactaaacgctactgcgccgggggatttattccggcgcacacctctgacgataccaataacagaaggcgggcgttggtaacagcgacccgataccctatgagcatttcaatgactacaaaactcagttatggatttggagcgttcgggaaggattttgcgatcggcattgtgtatatgtacctcatgtattactacaccgatgtcgtcgggctgtctgtgggtttggtcggtactttgtttctggtggcgaggatctgggatgctattaacgatccgattatgggatggattgtaaatgctacgcgaagccgatggggtaagttcaaaccctggatcctgatcggtacgttggcaaactctgtaatcttatttctcctctttagtgcgcatctgtttgaaggtactactcagattgtctttgtttgcgtgacctacatcctctggggcatgacttacaccattatggatattcccttctggagcctggttccaaccatcacgctcgataaacgtgagcgcgaacaactggttccttatccgcgtttttttgccagtctggcaggctttgttacggcaggtgtgacgctaccatttgttaattatgtcggcggtggcgatcggggatttggctttcagatgttcactctggtactgatcgccttttttattgttagtaccatcatcactctgcgcaatgtgcatgaagtctttagcagtgacaatcaaccgtctgctgaaggaagccatctgacacttaaagccatcgttgcgctaatttataaaaacgatcagcttagttgcctcttgggtatggctcttgcttataatgtagccagcaacattattaccggctttgctatctattatttcagttatgttatcggtgatgcggatttgttcccctattatctgagctatgcgggagctgctaacctggtgacgttagtattcttcccacgcttagttaaaagtttatcccgacgcattttatgggccggagcatctattcttccggtgttaagctgtggtgttctcctgttaatggcattaatgagctatcacaacgtcgtcctcattgtgattgcgggtattttgctgaatgtgggaacggcgcttttctgggtattacaggtcatcatggtggcagatatcgttgattacggtgaatataaactgcacgtacgctgtgaaagtatcgcttactccgtgcagactatggtggtgaagggcggtagtgcctttgcggcttttttcattgcggttgtgttagggatgattggctatgtaccgaatgttgaacagtctacgcaagccctattaggtatgcagtttattatgattgctctaccaactctgtttttcatggtaacgctgattctctacttccgtttctatcgcctcaatggtgacacgctgcgcaggatccagatccatctgctggataaatatcgcaaagtaccgcccgagcctgttcatgctgatattccggtcggtgcagtgagtgatgtgaaagcctgacgtggacaatagctaacgaaaatggcctgatgcgatatgtttatcaggccacgtcttaatgtaatgctttggatttgcaaattttgtagaccggataaggaattcacgccgcatccggcatcaacaaagcgcaagttgttatccggttatcaagccaaagcgccgtagctggcggcaatgaaagcgagcgaggaatatcaccgtcgttaatgcgccaagcagcgcgcagaacatatcggattgcgtgtcccactggtcgccctgggtgccgagaaaatcatccgctccctgacccattgccagcgctgcccaccactcgattaattcatacatcgcgcttatcgccagcgccacgcagcagaccaggaacgccaccattttacgtccgcgcacgtacatcccgcgaacgagaatttctcgtgccaccagtgcaggcaccagcccctggaaaaagtgccccagcttgtcatacggattacgactcaaccccagccattcctgcacctcaaaaccaacggggactttcgcgtaggtgtattgtccgccgaccatcaggatgatggcgtgaaggaaaatgagcgtatagagcagcggcgttaacggataacgtctggcggtggcaagcagtagctgcacgacaataatcaccggtgtcacttccatcagccaggtgagtttgtcatgggcgctaatgccggtataaatcaggattaacgttagcgtcagtgcgctggtgttaagaattaacggcttgagtgtgcgggtcatggtgagttcgcaaatcagggaaaatactgactattcaccagcaagcgtgaaattacaatcgcaaaagaggtggccagggggatcacctggcagcatgctgccaggcgctgggccgaagaggttacttagtgcagttcgcgcactgtttgttgacgatttgctggaagaagtcgttacctttgtcatcgaccaggataaacgccgggaaatcttctacttcgattttccagatagcttccatacccagctccggataagcgacgcactccagatgcttgatgctctgctgcgccagtaccgccgccggaccgccgatgctaccgaggtagaagccgccgtgtttatgacacgcgtcggtaacctgctgactgcggttacctttcgccagcatgatcatgctgccgccgtgggattgcagcagatccacgtaggagtccatacggcctgcggtggttgggccaagactaccacttggataaccggcaggggttttcgccggacccgcgtagtagatcgggtgatctttgatgtactgcggaagttctttaccggcgtcaatcagctctttcagcttggcgtgtgcaatatctcggcccacgataatggtgccggtgaggctcaaacgagtggataccgggtattggctaagctgggcgaggatctctttcatcgggcggttaaggtcaactttcaccgcttcgccttcaccggcctggcgcagttcttgtggaatgtactggcctgggttgtgttccagtttttcgatccagataccttcgcggttgattttcgctttaatgttacggtcagcggagcaggagacgcccatgccgaccgggcaggatgcgccgtgacgtggcagacggataacgcgaatgtcgtgcgcgaagtatttaccgccaaactgcgcgccaagaccgagtttctgggcctcttccagcagttcctgttccagctggacatcgcggaacgcctgaccatgttcgttcccttccgtcggcagttcatcgtaatagtgagcgcttgctaacttgacggttttcaggttggtttccgcagacgtaccgccaatcacaaacgcgatatggtacggcgggcaggctgcagtaccgagggtacgcattttctcgacgaggaagtttttcagtttgccgggagtcagcagggctttggtttcctggtagagatacgttttgttggcagagccgccgcctttcgcaacgcaaaggaatttgtactcatcgccatctaccgcgtacaggtcgatttgcgcaggcaggttagtgccggtgttgacctctttgtacatgtccagcgccgcattctgactatagcgcaggttatcttcgatataggtgttatagacgcctttgctcagcgtttcttcatcaccgccgccggtccacacgcgctggccttttttaccgacgatgatcgcggtgccggtatcctggcaggtcggcagcacgcctttggcggcgatttcggagtttcttaagaattgcagcgccacgtacttgtcgttttcgctggcttctggatcgtgaagaatagccgcaacctgtttctggtgtgccgggcggagcataaaagaagcgtcgtgaaaggcttgctgcgccagcagggtcagggcttctggttccactttcaggatggtttcgccgtcgaagtcggcaacgctaacgtaatcggaagtgagtagatagtattcggtattgtctttccccatcgggaaaggtgcctggtagataaagggtttgttactcatagcttccagcctgtaactctgtatttgttattcgaaaatggcgtgccgcgtagtcacgggcggcacgcaaagtgcatttataagaacccgtacatcgcggcgaagatccagccgaagacgcagcttacgctcacaccaatcaaccccggcagaataaagctgtggttgatgacgaagcgaccgatgtgggtggtgccggaacggtcaaactgaatcgctgccagatcgctcggataagtcggcaggatgtaataaccgtagcaagccggtgcactagccacgatgtatgccggatcaacgccgatcgccagcgcgaccggaacaatcgccgccagcgccgcagcctgagagtttacaaacttggaaaccagcagcagaacaatggcataggcccacggatactctttcaccatttcacccagtacgccctgaatttcagacatatgcgcaccgaacatggtttctgccatccatgcgataccgtacaccgccacgatggcgatcataccggaacggaagacttcgtttttactgatagacgcgggattggttttggtcaggataataatcagcgccccggtcagcagcataaacatctgaataaccagtaccatgctcagcggtttgccgccgaaggatggacgcaggtcgctatcagcaccaagaagggcgactacagcgattgccccgaggaaaatccacattgccagccagttgcttttcggcagttttttatccagcagcgtcgcggtatcaccgtaaacatactcacggttttccggtacggagatgaatttctggaactcttcgtctttatccagatctttaccgcggaaccagctgaagataccgatcgccaggataccgattaacgtgcttggaatggtgattgccagcagatcgaggaactcaagatggcgaccatcaaaggtgacattacccagcatcgcaaccagagacacgaccgcaacgctcaccggactggcgataatccccatctgtgcaccgatagaacttgccgccatcggacgttccggacggatgttgttcttaatggcgacgtcgtagatgatcggcagaatggtgtaaaccacatgacccgtaccgcaaagaatggtcagtgtacaggtcacaaacggcgcgacaatactgacatatttcgggttgcggcgcagcagcttctcggcaatttgcagcatgacatcaagaccgccgctagcttgcaaggtcgcgcttgccgccaccaccgcaatgataaccagcatgacatcaactggtggtttacctggctgaaggtggaagacgaagaccagaatgaccagaccgataccgcctaataaacccagcgcgataccaccctttctggcaccataaaacagacatatcagtattatgataagttggatagtaaataacatgtgtgaaccctcgcgataatcctatttaaatttttgctgaatagatcacagtcacgttctgttttgtatgaactgttttcagagcctgactaaatatccgtttggtcgttaccggctttagcaaatacctcacagtgaatattggctgattaaagcagcggcaaatttatgcactgtgataagcggctttttcagagagaaagactctctggcgatgggtttatagtttgtactgcgcagatgttaatgttttgtttgctgttatcttattgatatttatcggtctattttttgttctcagggcagatgtcattaggtttatagattaatctgatctacccatttgtgggtaaaaatacacataatgcgggtgacataatagttaattaacttttgttagcgttttgaaattaaaaacaccgttcacctgaagagatattaatttttagcgatgatggagggataattatatttgatctggcacaagttttactgatgaaggatgtaacttgtgccaggggtattttgcattacggtaataattattacttacagataaccagcgatccgttattggcaatattgtttcagtagactgtagtgttctgcctgaatacggtaacggtaaactggacgccccgtgacgccataatggatactggtgaacaagatgtggcagttgaccagccagatgaggtatttacggcaggaaacacggctaatgttaacctcgttggctagctcgtcggtactaaattcatagtcctggtgcgcgtcaatccactggcacagtgtgcgtaacgtctgcggcgttaagccttttggcaagcgacgaggatcctgttcgttggagctgctgccgtggattagctgatcaagctcggcctggtcataatactgatgtttttccagcgccattttcttttgccgccagccggtgagcgcctcttcaaagcgggaagcctggaagggtttgatcaggtaatccacgacaccgtaatgcaggctatctttaatggttgccgcatcggctgcggaggagatgacaatcacatcacttttgcaacgcgcgttatgcaggacaggcagtaaatcgagcccgttctctttttgcatatagatatcgagcaatatcaggtcgataggcgtatcgctattgaagataatctctttggctttctccagcgtgctggctgttccacagcattgaaagcctgggatttgtgctacgtatcggcgattcagctccgcgaccattgcgtcgtcatcgataattaatacattgatcatctgttgctcctctccccgtcccagggtatctggacaaaaaattgtgtgaaaatcccgggttcgctttccacggcgatgctgccgccgagattttctacctgttgtttgacaagtgctaaaccgacgcctcgctcgcttccttttgtgctgacacctttgtcaaaaatgtgatcgattttatcgggtgcgatccccggtccatcatcattaacttcacagtgcagccagccgtgacggtagtgcaatgttacgctaatttcgcctccgggttccggccctaatgcctccagcgcgttttctatcagatttcccaacgtggtaatcagcgtcgcgacctggtcctcactgccgctgtctggcagctggctttcactgtttaaaatcagcgtatggcctaaatcggtcgcgcggttaatcttgctgattaaaaaaccagcgataaccggagatttgatcttacccagcagagagccaatctcttcctgatagttattggctgttttgagaatgtaatcttccaactgcttataactcttcagatgcaataatccgagaatcacatgcaatttattcataaattcgtgggatcgttcacgaagtgcgtcagcatagttgaccagaccgtcgagtcgctgcatcagtttacgtacttcagttttgtccctgaaggtactaatggcaccgatgataacgccattactgcgcaccggaacggtgttgatcagtaatagccggtctttaatcgtaatctcttcgtcgcggcgcggggtaccgtcgcgtaacacttcgctgacatctaccacctgactccaactgtggcttagcgtgctcagtttctcatcgtcctggctcttacggtaattcagcaattcttgtgcggcatcgttgatcagcgtgacctcgccgcgatcgtccacggcaacgacgccttctttgatagactgcaacatggcctggcgttgctcaaacagcgtggagatttcgtagggttccaggccgaaaaggatttttttcagtaccttaaccagaatgcaggtgccaatcagtccgaccagcatgccaaataatacgctccagataatgctccagcgactgtcattgatctgttgggtcacacggcttaactcaaggccgatcgccaccacgccaatttgtttatgattttcatcgtagatgggggtaaatacgcgtaaagcctgcgccagaaaaccgcgattgatagcgacattttcttcgccattcagcgctttaaggatgtcatcacctttaaatggctgaccaatacgctgggcttcaggatggctgtagcgaagactttgcatatcggtaacgacaataaacagcagatcgttgcgtttgcgtacggcttccgcgatggcctggatgccactctcctgcggttttttctgcaagccctgacggatttccgggctgtcggcgagggtacgcgccactgccagtgccttgttggctagcccatctcgcgtcatatcactgatttggctgaagtaaatcagatgcaccaccaatagcacgctgaacagtaccgcactgaccattaagatcactgtggtactcaatttcatcggacgtttgcgtaacatgcggtagggcaaactatgtctcatcagcttccttgtgtgacaaatttcttaagcattatctctgatgaggcgggtaattcaaagggagtaagaatgattggctatataggggaagagactctggcaacggaaactgccagtgctgtatgaagattccggggctatgcttatagcgataatcatactgatgagagagggaaggtcatggatcaggcgctactggacgggggttatcgctgttataccggcgaaaagatcgatgtctatttcaacactgcgatatgtcagcattctggcaattgcgtacgtggcaacggcaagttatttaatctcaaacgaaagccgtggatcatgccggatgaagtcgacgtcgccactgtggttaaagtgattgatacgtgcccgagcggcgcgctgaaataccgtcataaataagcgagggtaaaatggaaatacgcgaaggccacaataaattttacattaatgacaaacaaggcaagcaaatcgctgaaattgtctttgtgccgaccggagagaatttagcgattatcgaacataccgatgtcgatgaaagcctgaaagggcaagggattggtaaacagctggttgcgaaagtcgtggaaaaaatgcgtcgggaaaaacgaaaaattatcccattatgcccatttgcgaaacatgaatttgataaaacgcgggagtatgatgatattcgcagttgatgggagagtacagagtcacgatatttttcattctctccgcgatgtgatgcaggagagcatctgaagggtagggggatgcacaaagaatgggcagagagcgcgtttttttgtcccaagtcatcccctttactgagcaaaaaaaagaatatctcctatatgagaatcatcaatcggggttaataagttttgcgtccccagagcgtttaatattgataggagtcatattatggaaggtaaaaacaagttcaatacttatgttgtttcttttgattatccaagttcttattccagtgtgttcttaagattaagaagtttgatgtatgatatgaatttctcctctatcgtggctgatgaatatgggataccacgacaattgaatgaaaactccttcgcaataacgacaagcttagccgcaagtgaaatcgaagatttaatcaggctcaaatgcttagacttaccggatattgattttgacctcaacattatgacagttgatgactatttccgtcagttttacaagtaaccaggaaggataagaagaacataaaaaatggcactattctctaaaatattaattttttatgtgattggtgtgaacatatcctttgtcattatctggtttatcagtcatgagaaaacacatattcgtttacttagtgcattcctggtcggaataacctggccaatgagtctgcctgtggcattacttttttctctcttttaagagctgtagttgagtggacccgctggttatcgtgaaacgaagcgtctctcctcaaaactggatttgcggaacgatgaacgaagcagtcgcctgactgcttcgttcattaaagtgaaatttatttctgtgggcgcatcgccgggaagagaataacgtcgcgaatagtatggctgttagtaaacagcataatcattcggtcgataccaatacccagaccagcggttggcggcagaccatattccagcgcagtcacgtaatcttcgtcatagaacatggcttcgtcgtcacctgcagctttagcattaacctgttcctggaaacgttcagcctgatcttctgcgtcgtttaattcgctaaaaccattaccgatttcacgaccaccgatgaagaattcaaaacggtcggtgatttccgggttaacatcattacggcgtgccagcggggacacttctgccggatattccgtaataaaggttggctgaatcagatgtgcttctgccacttcatcaaagatctctgtgacaatacgtcccaacccccagcttttctctaccgtaataccgatagattcagctaatgctttagcagcatcaaaattatccaggtcggccatatcggtttctggacgatattttttgattgcttcgcgcatggtgagtttttcaaacggtttgccgaaatcaaacacatgctcgccataagtgactttagtggtacccagaacctcttgtgccagggtgcggaacagactctctgtcagttcaatcaaatcgtggtaatccgcatacgccatgtagagttccatcattgtgaactcaggattatggcgaacagaaataccttcattacggaagttacggttgatttcgaatacccgttcaaaaccgcctacaaccagacgtttcagatacagctccggcgcgatacgcagatacatatctaaatccagagcattatgatgggtaataaacgggcgagcagatgccccacctggaattacctgcatcatcggggtttctacttccataaagccgcgcgcgaccatgaattgacggatagcggccagaattttactacggacaacaaacgtttgacgggatttatcgttagcgatgaggtccagataacgttgacgataacggacttcctgatcctgcagaccatggaatttatctggtaaaggacgtagtgctttagtcagcaggcgcagctcagtacagtgaatggaaagctcacccgtttgcgtcttaaacagcgtaccgcgggcaccgataatgtcacccagatcccattttttaaactgatcgttataaacaccttctggcaggctatctcttgcaacgtacagttgaatacggccaccgacatcctgcaacgttacaaaggaggctttccccatgatacgacgggtcatcattcggccagcaacgctgacttcaatgtttaaggattccagttcctggttatccttcgcatcaaactcttcgtgcaactggtcagaggtatggtcgcggcgaaaatcattgggaaacgccacaccttgctgacgtagtgccgccagtttttcgcggcgatttctcagttcatcgttaaaatcaatagcctcattggctccccgtgtttcttgttcagacattttggttcctctaaatccagctttcaatttagcgtagataaagagacagatcggtacactgtattatctgcctcgactattagtaactcagtttatcttatcgaaactaacgcttacctcaagttgatatcactaataaataaccatcaaaatggtttaaatgacttattaatctcgatttgttagtgttataaactaaaagttaatttattcataaccaattgtttttacgacagttaatcgttgctctcctgtatcatattcgtcggcgtgctaaacagaaaacgggtagcaaaggccaatacgacgatgatcgcgacacaagccaacgtccactctcccatctgagaaaagaatcgctggtaagctgcaattgccataccgctaatttggctctctgtcgtctgctgtgccacgacgcctgccagccagttggcgaccgcgcctgttgccagcatataaatcccggttaatacgccagacattttcagacgcgtgatttgcgcaatcgccaccgggtcaataaagagttcggcaaagcccattagcgccagcccggatatcatcacgcccatactcgcttgaccgtcagccgctgcatgtcgggcatcaaatgccaacaacataaagccacaagccatcagcagtaagccaaaggcaaacttcagccagacgcgcaatgtactgttgccgcggctttctgggctcgccagccaggccagtacaaccccagcgagcatcaccgcaattgcattcacgctctggaatagtgctgtaggtacttcaatattgaatgcctgacgattcacaaagcgatcgataaacaagctgatggtactgccgccctgttgtgccagtacccagaacaatgtcccgacaaacatcaacaatacaatttgccaaagagcacggcgatgttcggggaatttgatcatcatgcgggcaatgatttgtgcggcaatgaggcaaacgatcgccagcaaatatccggaccagtcgttctccagcagcagagtaaaaaatactggggctaaacagagcatcaccactaaccagctccatactggtaaggcaaatttgacactagtgagcgcttttttatccatactacgtgtggactggaaatgacgatgaccgcttaagaaaatcaacaaaccgataaacatgccgccacccgcaagggcaaagccaacatgccatccataccactgagcagccaggccgcaggcgattggggctgcgatagaaccgatattgcccgcagcatacagcaggctaaaaccgccatcacgtcgatgatcgttctcgtcgtagagctcgccaagcaaacagctgatgttacttttgaataaaccgtagccacaaataatgattgccagcgccagatacaggctaaaggtactatttgtatcaatacccagcaccacatggccaagggtcattaacagcgcgccggcaatcactgcagtgcggttgccgagcaggcggtcggcaagccagccgccgagaataggggtaacgtaaaccagagaagcatatgcgctgaacaggctgatggcatggttatcatcaaaaccaagctgatgggtgagatagagaatgagtaaggcacgcatgccgtaaaaactgaagtactcccagatttggatcgccacgatatagtatatcgcgcgcggctgactgggtgttttcatgtgttctccttatgagcaaaaaagggaagtggcaagccacttcccttgtacgagctaattattttttgctttcttctttcaataccttaacggtatagcggccatcagcctgacggtatgcaccgtgaatatcggtttcaaagcccggatagtgagcgccgatttcacacagcatctgcaggaactccagaaccggacgactttcttcggtgatcatttcacccggcattaccagaggaactcccggcgggtacggaaggatcatattggcgttaatacgacctaccatttcgtcgaggtaaacttcttcggtcataccgtgcagctctttctggaatgcagcatacggagtcattaccatcgtcggcagcacttcaaatgcgcgatacatcagatccggcagattgtggtgaacaatcagtttgtggatattctgagccagttcctgaatacgcatgttttcatagaattcaggatcttcacgatacagagacggcagcatgtttttcacacgcaggttcaggtcgaacgcacgtttaaagtcagtcagagcacgcagcaggctcagtgctttggtcttatcgataccgatgctgaacaggaacagcaggttatacggaccggttttctcaacaacgatgccatgttcgtcgaggtatttcgccacgatgctggccggaataccaaagtcgctcatggtgccgtctttttccatccccggagtcagcagggtgactttgatcgggtcaagatacatgtgctcgttatcgatgtttttgaagccgtgccaggtgctgtcagaacgcagcggccagcattcagtcgtatcgatatgatccggctgccatacatcaaagaaccagccatcagattccgttctcagacgtttgatctctttacggaatttgatcgcacgttcaatagaaccgttgatcagacgcttacctgcattgcctttcatcatcgccgcagcggtttcagtggacgccacgataccgtagtgcggagaagtggtggtgtgcatcatgtaggcttcgttaaaggtttcttcgtttacgtcacctttaacgtggatcatggaagcctgagagaacgccgccagcagtttgtgagtggactgggtttcgtaaatcactttcccttctacacggccaccgctcataccgcatttaccttcgtaaatcggactgaagttggtgtaaggcacccacgcggagtcaaagtggatggatttcacatccagtgttttcttgatgaagtcggtgttgtacagcagaccatcataggtagagttggtaattacagcatgtaccggccaggttgcgtttggtgtttctttcacgcgcttagcaatggtagcgtgctggaattcactctgtgggataccaccaagaataccgtaagcgttacgggtcgggcggaaatagattggcgtaacatcgctcatcatcatcaggtgggtcaggcttttgtggcagttacggtcaatcagaatggtgctgcctgctggagcagagtacataccaacaattttgttcgcagtggaagtaccgttggtcaccatgtagctgcggtctgcgttaaagacgcgagcgatatactgttctgcttctttgtgtggaccactgtgatccagcagagaacccagttcagatacactaatggaaatatcagatttcatggtattcggaccaaagaaatcatagaacaggctacctaccgggcttttctggaatgcagtaccgcccatgtgaccaggagtacagaaagtatatttaccttcacgaacatatttaaacagtgctttagtcagcggaggcagaatagtgttgatatattcgtcagtggtctgcttgatcttattagcaatatcttcagcagcacccagcgcatattcaaagaagctaatctgtaaacgcaggtcattcaggcttacatcgagagtggaatacgtattagcgaacgcgtacaacggcaggttctcgttcattttgctaatttcttcgcacagctcgagattatatttatcccagtcaaaaataacgccgcacagacgcgcattgttttcgatcagttttaataagtcgtcacggtcgttcgggtaaacaatctggaagttcagacgttcaagcgcgcgatgaagttcacggatgggttcttctttaaaataaacccccatgtgattcaatattgcaataacgttcatagtcatatctccaggtaaaaaaggcccctcccaacacatgggacaaaatgaaaggaggagcctcggaaaatacttttaattaatgtgcgttagacgcggtgtggttatccatactgtggctctggcgctcgtgcattttgcgagcgtagaacatcaggataatcaggctgacgatgaaggtacctgccagctcgaaggagcttgcgcccatcagcgcgatgaagcagaacacgcaacccagtacagagcagatcaggctgacaaagttgcggatgttaacgccttcaaaacgaatcaggtcaacgcaagagtagaaatacggcagcatagtcagcagtactgcgataccggtcagttcaccgaacaggtcagatgctttaccaccggcagagttcatcagagtgataaggatcatcagggcagtcattttcactgcagccagcagcagaccttttttcggaataccgttgctgtcgacttcaccataaactttcgggaagttaccgtcgttagcggcacgtacacctgcctggcctaccaacatcatccaggagcccagagaagtcaggcacgcaaaggcggtgaatgcagaaaccagcggcgcagcccagttaccgaggatagtactagcactgattgcaaacggagcaccggaagccgccattacagaagacggatacataccggaaagcacctgagtcgcagcgatgtaaacaatacctgctaaaccagtacccagcatggttgccagcggaacggtacgtttcgggtttttaaccataccagtacttacagctgcggattcaacacccacgaaggcccacaggcagagcagaatacttttaatgatcgcatgaccatcagtggtatccgcagtattccagttagctgcataagttgccgcatcaaaccaatgccagccaacaatagcagtcatcaccacaggaataagaaccagcaccagaccaatagtggttaaacggcttacccaagtaccgccgagcatatttacaaaggtaaatacccagacgatagcaatacaggcgatacccgccggaacaggatcatttaatactgggaagaaggtggaaagataagatacagcggtaataccaatcgccaggttaccaatccagttagcatggtaataaagaacacctgtctgaaaaccaaatgcaggggaaatttctccggcataagcaattgggccaccttgttgcgggttttttgttgccagtcgggcatatacatacgccaggctcattgcaccaataatagagataatccaaccccagatagcaataccaccgatacttgctaggttcgcaggtaataatgcaataccgctccccatcatattaccggcaacaacaccggtacaggcaaatagcccgatcttcttggcagaactcatgctcttctcctaatttcatttttgaatttggagtccgggtcatgatgtataactatttcctgaccagaccaaactggcgataagattactcacgaaaaaaggattaatcctaaagattaggtgaaataacacaaaagtttctgtaagtgagaacttgaggttttttattaacacatcaggatcgcaagttgatatcatgaaaagataaacatttaatgtttacaatggattgcgtgacattctctggttaaatttatgtaataaaaattatgcggcaaataaattgccgcaacatattataccaacaggaacatacaaaaactcaacaacaaatatttccgagcataaatcaacccggagttacttattcactagcaagaaatttgtcgagataaggtacaacataaggaacagaagtctggaatataccattttcaatccagtaaagggtgtttgcccctgggcgtaaattaaaggcggtgagatatgcatcagctgcttcccggttcatccccttcatttcataaaccttgccaagcaacacataatttagccaggacatttcaagatcaatgccagtatttatcgcctggtaagactcatctgttttaccttttaccagagcactgaccgcttttatttgatatataatggacaggttgttcaattccggcagtgtaacaatgttatctatttctgtgttcagtgctgctaattgtttttcatctaaaggatgttgagaatggcgcacgatatcaactaatgctttttctgctctcgcgtaggtaaattctggggaactttgaacaatctcacctaataattcactggcacggttcaaacttttatcatcgccatgcagtaaataatcatgtgcctgataaaaattagttaataacgcaccacgatgcggcaaaattttctggagcgtctcctgcattcgttgtggccacggttggtttaacgctttacttaaactctccagtaaatcattttgaatcgccagctgattaccgttagtgatgacataacgtttatccagcatggtactaccatctgcattgtctaccaattttatgctcataaagcattgttgagcacggtattggcgctgattaacaaacgcaatagataatgttttaccggaactgctcggttcatcaatgttgtagttgattttgtcatgcaccataaaggtggagaaggtgttaagacttgtcgccaccaaatcacccacgcctatcgcgtaagagagctgatacggggaactccagctgttacaacttttatttaccatattaatgtcaatatcgcgtggattgagcaaaatacggcttttgctcataggaagacgtgtatcaagactactaaacgctaccagtgctacacagatacctaagctcaacaggaaaaaaaaccatacccaaaaggtagtgaatcgtttgcttttaactggggattgttcaggtggcgttgcggtgttttgaatgttaagactgtgggagggagaatctgtggcaggaaccgcctctggtatagggggagggctagatagcattatttcctctccctcttcttcgctgtaccagataaccggcaccattaatttatagccgcgctttggtacagtagcgatatagacaggactatcttcatcattatcttttaaactcttacgtagttcactgatactctgcgtcacaacgtgattggtgacaatacttctcttccagacattatcgataagttcatccctgctaagtacttcgccactgtgttgagcaaagaaaaccagaagatcgattaatctcggctcaagggtaagttgacgcccattgcggctaatttggtttatggacggagtaacaagccattcgccaacgcgaactacaggttgttgcataatagaaactcattcgaaaagggaatgatgcaatgataattgccacaacctatttttaccatctatagatgggtttatttacatattattggtgaatgcaagacgttatttttaccagccataaacttcttgattacatagtattacgaaaggattttactgagaaccagaagtaatattccttaccatcaaaattcatcatctttgccaaagaaaaatgttcagaaaataatccatggaaaattgtccggagcacttactattttaatggattgttagtctttgcatgagcaagcgaactgatacatttctctttgttctcattcagaaaatctcatcagtcgccgttcagaccggtgttgtgctttatggatgcgttacgctcctgatgacgtcatttgacgttcaacagcatcacggggccgcacgacatttcacgtcagttagtgctatagctcaggaacaaattttcccgaattgggatatgcccgcaaattgctggtgatgtggggagaatctggttgagttcggtagaattgatttggaggcagaacgcttaaatcgtggcgtcctgaaacgaaaaacggacctccgtggaggtccgtttatatgaatttggtgcccggactcggaatcgaaccaaggacacggggattttcaatcccctgctctaccgactgagctatccgggcaacggggcgcattaaaccgtaatctgcacatctcgtcaacctaatttcagtaaaagcgattcaactgcttaagattgcggcaaatcgcttcttttctgtgtttctgtcaggtcaatgcaccaccctggcggcagcgggcgaagcgcaggatatcttccgccagccgatgtgcagtgtcgacatccgcctggctacgattcaccagcattcggcttaaacagccttccagcaccagttccatctgctttgctaccatcgccggatcgtcaacttccagtgtggttaacagttcgtgggtgaaatcgtaggccgcgcttttttgctgatcggccagttgatgaatagggtggccaggatcgggataaaacgtacaggcagcgataaatagacagcccggatagcggttgtttttaacgcactcgcttaacgcctgataacgtgccagcagcttttgttcggcggtttgcgtttcgtccagcatcagctgacgacgccagacatctatctgttggctaagataacgcagcgcatcgtagaggattgcctctttgtctggccagaagcggcgtagctcgtccagtggataatccacacgttcagcaaccatctccagcgtggtgttggcaatcccttgtaattctaataatttcagggcttctcccagtacatcttcacgttgcacgctattttcctccgtctttcccactgcaagtgtcgttcacggttggcgatcgcgcaaatgtgcgctgaaggtttcagcatccataaagcccgtgacgcgtgcttgtggatgctcctggccttgtccgtcaaaaaagagaattgtcggtaggccaaggacattaagatgctttaacagcgccacatcttgtgcgtcgttggccgtgacgttggcctgaagtaagaccgtgtctgctaacgctttttgcacctgcgggtcgctgaaggtgtatttctcaaactctttacaggcgacgcaccagtcggcataaagatctaacatcaccggtttgcctttggcttcaacgagcgcctgatttaactcatctaccgttttgatttgtgtaaagttgagatgcgtctgagtttgcgcggtatgcgtcgcaccaaatgcccaatcctgaagtgggcgcacgctaaccaatgccgctgccagcagaataatttgcacaatacgcatccagccgcgtttagcctgtaggctggtgataaaggcccagccaaagaatgcgacacccagcgcgctccacaagcgtaatccccatacatcaccaatcactcgctccagcaggaagaccggcagtgcgaggatcacaaaaccaaacgcggttttgacttgttccatccacgggccgcttttcggcagcaagcggttaccaaagacggtaattagcatcagcggcaggcccatgcccaacgcatagagataaagcgtgccgccgcccagccacatgttcccgctttgggcgatatacagcagaatcgcgctaagcggtgcggtggtgcatggactacagatcagtccggcaatcgcccccataacaaacacaccgccaggactgccgccctgttggcgattgctcatcaacgtgagacgtgtttgcaggctagaggggagttgcagggtaaacaagccaaacatactcatcgccagcaaggtaaagacgatggcgaggccaatgagcacgtatgggtgctgtagcgccgcctggaactgtaaccctgcggcggcaaccaccagacccagcgccgtgtaggtcagcgccatcccctgcacataaataaaggtcagcaacaatgctctggcagtggagagccgctgtttaccacccagcacgatgccagaaatcagtgggtacattggcagcacgcatggcgtaaaggcgataccaataccgatcaacaacgcccagagcgcggaaaagggcaattgcgcggtgggctgctcttgctgcggaacagacacaggctgtggcgctgcgttgttggcgaccacttcgcttaacggaacggttttggtttctggcggataacagaaaccggcatcagcacagccctggtaggtgacagttaacgtcgctcccgcactcgcctggttgatggtgacgggaagcgtcagccgatcgcggtaaatctcgcttttgccgtaaaactcatcttcatgccagacgccttgcggcagctgcacgtcggcaattttcgcgtgttccggcgtaatgcggatctgtttacggtagaggtagtaaccgtctttgatctgccaggtcagattaaggtcatgttggttttgctgaaaatcaaaagcaaaggcttgatccgcggggacaaattgactacgtcccggcgcgtcgaataatccggcaaaaacggaagtgctgcaaagtagcaggatcagcgtaaagatgcgttgagccatgagaggtaatctgtgtctccttatgtcagcgtaaagatgcgttgagccaactgaggtaatctgtgtctccgtgtgtaacaggtaaaaccagaagttccggggtttgatatggatgatgagacttcaggcattccagcagtgcctgctggtgagatacggtagtttttaaaatcatctgcacttcgtattcttgctccagcttaccttcccagtaatagagagaggtagcgccggggatcaaggtcgcgcaggccgccagtttttccgccagcactttggcggctaaatcctgggctgtcgcttcatctggtgccgtacatagcaccacgacagacgcggtattgctacttttttcatcaagcataaacacctcgcaagaacagatggaaccgcaagagagaggtcactatacaacggacgggggaaggatgttagtcggcgggaaagaaagcggggcgtgaacgccccgcgattgatcattacagcatgaagctacccagcacgaagccgaagcaaacggccagggcaacacccagagtacccgggatgaagaacggatggttgaagacgaatttaccgatacgggtagtacccgtgtcatccatctgtaccgcagcaaccagcgtcgggtaggtcggcagaatgaacagaccagacaccgcagcgaaagaagcaacagcggtcagcggactaacgttcagtgccagagccatcggcatcagtgcttttgcggttgcagcctgagagtacagcagagcagaagcaaagaagaagatgacggccagcagccacggatgaccctgaatcacttcaccagcggtatctttgatccagtcgatgttgttggaaacgaaagtatcgcccagccacgcaacacccaggatacaaatacaggcgctcatacctgctttgaaggtgctggagttgaggatgttgtcggtatcgactttacagataacggtggtcagagttgcaacgctgagcatgatgatcaggattgcgttggtggtgttcatcagcggtttttcaaccagacccatgcttgggctgttgatgattgcatagataaccacgccaactacgcccagcaggaacagccagacggacgtttttgcaccggatttgatttcaatctgcttttcaccgcgcagttcaaccaggccctcttccagacgcttgcgataaatcggatcgtcagagagtttggagttgaacagcatagtgaccaggaaggacatcaccagaaccgccagcagggtggacgggatgaccacggagagcagatggaggtagctgatgccatgaccttccatcacggaagacatgtaaaccactgccgcactgattgggcttgcggtgatcgcaatctgcgcggataccactgcagtagacagcggacggcaaggtttaacgccttgttccttcgcaacttcagcgataactggcagtgtcgccagagagatgttgccagtaccagcaaagatagtcaggaaataggtcacgatcggtgcgaggatcgtgatgtatttcgggttacggcgcagcagcttttctgtctgatgaaccagatagtccagaccgccagcaacctgcatggcagaaatagcggcgataaccgccatgataatggagatgacatcgaacgggatgttaccgggtttaacgccaatagcggcaagaaccagcacccccaatccgcctgcaaaaccaatacctattccccccaatctggcgcccaagaagatcgccagcaaaactatgatgagttctacaactagcatattagccttccttgttttttaacaagttgatattagattgttatttttaagttactgctcacaagaaaaaaggcacgtcatctgacgtgccttttttatttgtactaccctgtacgattactgttcgctttcatcagtatagcgttttgctttgtaagccgggtgcatcagattctgtacggagaaaatatcgtcaagttccgcttcagtcaacagaccgcgttccagaacgacttcacgtacactcttaccggtttcggcacagattttacccacgatgtcaccgttgtggtgaccgatgaacgggttcaggtaagtaacgataccgatagagttgtaaacgtaaccttcgcacacttctttgttagcagtgatgccgttaatgcatttttccagcaggttgtagcaagcgttggtcagaatgtgaacggattcgaacatggcctggccaatgaccggctccataacgttcaactgcagctgacctgcttctgctgccatggtaacagtggtgtcgttaccgatgactttgaagcatacctggttaaccacttccggaacaaccgggtttactttagctggcatgatggaagagcccgcctgcagttccggcaggttgatctcgttcaggccggcacgtgggccactagagagcaagcgcaggtcgttacagattttggacatcttcacagccaggcgtttcagcgcgccgtgaaccataacataagcgccgcagtcagaggtcgcttcgatcaggtcttcagccggtacgcatgggaagccagtaacttcagccagttttttcactgccagcggagagtactctttcggcgtgttcagaccagtaccgattgctgttgcaccaaggttaacttccagcagcagttcagcggtacgttggatgtttttcacttcttctttcagcaggatgctgaaagcgcggaattcctgaccgagggtcatcggtactgcgtcctgcagctgggtacgacccattttcaggatgtcctggaattcgacagctttacgttcaaagccttcacgcagttggttaatcgcatctaccagcttaatcagggaagagtaaactgcgatacggaaaccggtcgggtaggcgtcgttagtggactgacatttgttaacatggtcgttcgggttcaggtactgatattcacctttttggtgacccatcagttccagaccgatattggccagcacttcgttggtgttcatgtttacggaagtacctgcgccgccctggtagacgtctaccgggaactgatccatgcattttccgttgttcaggacttcatcacatgcggcaatggtggcattcgctacacttttaggaatggtttgcagctctttgtttgccatagctgcggcttttttaaccattaccataccgcgaacaaattcaggaatatcactgattttgttgttgctgatatagaagttttcaatcgctctcagagtgtgaacaccatagtaggcatcagctggaacttccctggtacccaacagatcttcttcgatacgaatgttgttactcatgtgaaccttctttttcaagctgccaatgatttgctttaaacacacagaatatatgtggtttcgaatgtttttcgaccgacgattatcccctgcatcgaccgaatacccgagatcatatgctgcttgaggatttctaccgtaatctggatcactttaagtgtcggtttttaccccttaattattaatttgtgaaatagatcaccgctttgggattactaccaaaaatagttgcgcaaacatcttgaaattttgctaatgaccacaatataagctaaacgcgattcgcaacccattcaggtagccggggttaaccggctgctattacaggagaaacctttgcgctggttaccttttattgccattttcctttatgtctatattgagattagtatctttattcaggttgcccatgtattgggggtattgctgaccctcgtgctggttatattcacgagtgttatcggtatgagtctggtacgtaaccagggctttaagaatttcgtgctgatgcagcaaaaaatggcggcgggtgaaaacccagcggcggagatgattaaaagtgttagcctgatcattgctggtttgctgcttttattaccgggcttttttaccgacttcctcggtcttctacttttattgccgccggtgcaaaagcatctgacagtgaagttgatgccgcatttgcgcttttctcgcatgcctggcggcggttttagcgccgggaccggtggcggtaatacttttgatggtgagtaccagcgaaaggatgatgagcgcgaccgccttgatcataaagacgatcgccaggattaatgtcgaaacgccggattatgtggttatgccattttccggcgtttttcgttttggcagcaacagccataaccccgccagcatgatcagcgcatagagacttttccagccgaccattgccagtaacagaacgcataacagcccgccaaccaccgccagtagtcgataacgtccttgcaataatttacagcctgccagcatgcataacagataaatcataataaagatgccattggcataaataataagagcgtccagattgatctctaaagcatgaatcaccaaagtgctcaccacacagcagccgagcaccgcattgagggcattattcgggatatggcgagaagagaggcgtgccaggtagtggtcaggattatgttgcgcctggctccagaccaggcgggcgaagctctgtatataaatgttgagactggcaaagcaggccagatagccaatcacgcaggcaatccataacgctcctacaccgaacaactgcactacaatttttggaaggcttgctgccgccgccattttttcaccataggcgtcgaagtgtaagacgactaccgtacagccccagtagactaatcctgccagcagcagaccaatcatcaaagcacgaggaaaatcacgctctggatttttaaattcgctggcgagatgggcaaatgcctccagaccgacaaaacaccagaacatcacacttaacgcagcaaataacccggtaagttcgatattaccaggtgccggaaaggggatattcgcaggtttgatatcgcccgcccaccagatagcgacaatcagcgcgacgataagtccggcaataacggtttgtagattagcactggaactggcaccgcgagtaccgatataccacaccagcgccagcgtaccgagttctgccaacaacagttgccagctatgccagccaaacatcgcctggccgaacccggcggcaatttgtagtgcggcaggcaaacccacgggaatgacgcttaaaaacagccagccggtgactcgctcaagccggctaccaaacgccataccgacgaagtgcgcgacgccgcctgcgctgggatagtggcgacccagaatcgcaaacacaatcgcaatcgggaacactaagataatcaaaacgggccacgcccacaggctgttattgcccgctaccagcgcagctaacgcaggaacggcaaacacgccagtgcctaataaactcgtgcttagcaggccaatgccctgggccagccccagttcttgtttgagtccactcatgggttgatgtccgattgcgcccaaattttgggcaactgcgtagattttcgatggtagcacaatcagattcgcttatgacggcgatgaagaaattgcgatgaaatgtgaggtgaatcagggttttcacccgattttgtgctgatcagaattttttttctttttcccccttgaaggggcgaagcctcatccccatttctctggtcaccagccgggaaaccacgtaagctccggcgtcacccataacagatacggactttctcaaaggagagttatcaatgaatattcgtccattgcatgatcgcgtgatcgtcaagcgtaaagaagttgaaactaaatctgctggcggcatcgttctgaccggctctgcagcggctaaatccacccgcggcgaagtgctggctgtcggcaatggccgtatccttgaaaatggcgaagtgaagccgctggatgtgaaagttggcgacatcgttattttcaacgatggctacggtgtgaaatctgagaagatcgacaatgaagaagtgttgatcatgtccgaaagcgacattctggcaattgttgaagcgtaatccgcgcacgacactgaacatacgaatttaaggaataaagataatggcagctaaagacgtaaaattcggtaacgacgctcgtgtgaaaatgctgcgcggcgtaaacgtactggcagatgcagtgaaagttaccctcggtccaaaaggccgtaacgtagttctggataaatctttcggtgcaccgaccatcaccaaagatggtgtttccgttgctcgtgaaatcgaactggaagacaagttcgaaaatatgggtgcgcagatggtgaaagaagttgcctctaaagcaaacgacgctgcaggcgacggtaccaccactgcaaccgtactggctcaggctatcatcactgaaggtctgaaagctgttgctgcgggcatgaacccgatggacctgaaacgtggtatcgacaaagcggttaccgctgcagttgaagaactgaaagcgctgtccgtaccatgctctgactctaaagcgattgctcaggttggtaccatctccgctaactccgacgaaaccgtaggtaaactgatcgctgaagcgatggacaaagtcggtaaagaaggcgttatcaccgttgaagacggtaccggtctgcaggacgaactggacgtggttgaaggtatgcagttcgaccgtggctacctgtctccttacttcatcaacaagccggaaactggcgcagtagaactggaaagcccgttcatcctgctggctgacaagaaaatctccaacatccgcgaaatgctgccggttctggaagctgttgccaaagcaggcaaaccgctgctgatcatcgctgaagatgtagaaggcgaagcgctggcaactctggttgttaacaccatgcgtggcatcgtgaaagtcgctgcggttaaagcaccgggcttcggcgatcgtcgtaaagctatgctgcaggatatcgcaaccctgactggcggtaccgtgatctctgaagagatcggtatggagctggaaaaagcaaccctggaagacctgggtcaggctaaacgtgttgtgatcaacaaagacaccaccactatcatcgatggcgtgggtgaagaagctgcaatccagggccgtgttgctcagatccgtcagcagattgaagaagcaacttctgactacgaccgtgaaaaactgcaggaacgcgtagcgaaactggcaggcggcgttgcagttatcaaagtgggtgctgctaccgaagttgaaatgaaagagaaaaaagcacgcgttgaagatgccctgcacgcgacccgtgctgcggtagaagaaggcgtggttgctggtggtggtgttgcgctgatccgcgtagcgtctaaactggctgacctgcgtggtcagaacgaagaccagaacgtgggtatcaaagttgcactgcgtgcaatggaagctccgctgcgtcagatcgtattgaactgcggcgaagaaccgtctgttgttgctaacaccgttaaaggcggcgacggcaactacggttacaacgcagcaaccgaagaatacggcaacatgatcgacatgggtatcctggatccaaccaaagtaactcgttctgctctgcagtacgcagcttctgtggctggcctgatgatcaccaccgaatgcatggttaccgacctgccgaaaaacgatgcagctgacttaggcgctgctggcggtatgggcggcatgggtggcatgggcggcatgatgtaattgccctgcacctcgcagaaataaacaaacccccgggcagaaatgtctgggggtttttcttttggtcatctttctagtataagattcagacacggacgacgcgagtggcgtccagctcattgattatggggaataacatgcacgtaaaatacttagcagggattgtcggtgccgcgctactgatggcgggttgtagctccagcaacgaattgagtgctgccggtcagagtgtacgcattgtggacgagcagccaggcgcagagtgccagctgattggtactgcgacaggtaagcaaagcaactggctttccgggcaacacggagaagaaggcggttctatgcgcggcgcagcaaacgatctgcgcaaccaggcggctgcaatgggcggtaacgtgatttatggcatcagtagcccgagccagggaatgttgtccagttttgtcccgacggatagccagattatcggtcaggtttataagtgcccgaactgatgtgatccagaggctgggtgacaaacgtataattgcctgatgcgcttcgcttatcaggcctacataaggcattgcaactgattgaatgcttgagaatttgtaggccggataaggcgtttacgccgcatccggcatgaccaacgatcacgttatcagtcatttcaggctggatggctccagcctcgcattagcaaagatgagattatttcgcctgtggtgcagttttgctggtggattgaacacgtaagtgatgcagcgcgcgtaagcattgatcctgggttagcggttgggcgttattcgccgctacggtgcgaacatagacctgacatggcacacccgcgagttttttcagtcgtgggctgaaatcaagcattcggcgagtgatcgcttctatttctttacccggcgttgcttcacgcgttttcaccactgcgccgctaaattgttctttgccactttcatctttaaagcggtaaagcaccgccagataatggtcgaacaagttatgtttccattccggttgggaataggtgtcatattccagattgccattgtcctggcagtcaacgtcgtataacggcaggaaatctaacagactggtaatacgtaatgccagttcacgcatttccgcattattaattgcatgaatgattgctcgcgccagcatttcaatctgcaactcattgacgactaactcacatttgctaccgtcatgtagcgttaatacgaaggtaagattttcgccttgattatcggtaagttccagcgtgttaacccgacgattaatatcggcatttttaagctcatcaaccagaatttctgggatgttttctgccattttcttaatgactttatcgcgagcttgctcatactgaaggtgtgcagcagcatccagtttatgcttttgatgcagacgactttccagcgcaatcagcaggtcgcgcagttccatgacagacataaagaacaagctttctttattgcgaggttctttaattttcagcgccagtgcaatgaaattattactcttgcgaataacaccggtattaacacccttgatgcttatggccatgtaggttctccctaaccatttctcaattaaataattaattttaatttataagccagataaatgggcttggtagtaatagttgttaaaataacataaatagccgtactcactctatataaacagaaaagaaaggttaattattggtgttagctatataaaaagtaacaacagcaatgcatatgaataattaaaggttatgcaacgggcaaagattaaacttcccagtttaatgacaggttgctgtacttgcgtttgttgctcttgccggatgcagcgtaaacgccttatccggcctacagttcattgcaaatccattcaatttcaatgcacgatgtaggcctgataagcgtagcgaatcaggcaattttaatgtttaacttccctgtttaatcagttactgctggcgtagctggagatccagcggcgttttgctgggttcgccgccaatttctcgcgccagtttcggcaccagatatccgctcaccagtgtcagcaactcacgcataatctgccgtgcttcgtcatcactcaccataaaatgcgccgcgccctgtactttatcgagcacatgcaggtaatacggcattacgccggcatcgaacaacgcattactcaggtttgccagcgtttgtgcgttatcgttcacatcacgtaacagaacgctctggttcagcaaagtaacgcctacccggcgcaacttagccatcgcctgacggaatgtttcatctacctcattggcatggttgatgtgattcaccagcaagatttgcagcgtagaacgggcaaagcattcaaccagcgcctcggtgatacgtgccgggatcacaatcggcagacggctgtgaatccgcagacgttttatatgcgggatggcttccagttgtgtgagcaaccagtccagctcgtgatctttcgccatcagcggatcgccgccggagaaaatcatctcgtccagttccggatgcgcagcaacatactcaagtgcagtttgccagttacgcttgttgccctgattttcggcataggggaagtgacgacggaagcaatagcggcaatttaccgcgcagccgcctttgaccagcaaaagcgcccggttgtggtatttatgcaacaaaccaggcactacgctgtgctgttcttccagtgggtcggtggagaatccgggcgcgatgacaaactcatcttggctggtaagtacctgacgcaaaagaggatcgtccggattgcctttctccatgcgatcgataaaactgcggggcacacgcagggcaaaaagctttttggcgctgcgtccggctaacagtttttcctccgcgtctatattcaaaagacgcagaagttcatcaggatcggtcacaacatcggcaagttgcgttaaccaatcttctctggatggggtatttagggttacaatatgcgccattttgtggcttagctaccaattaacaaatttcagagggccttatggcaacgtactatagcaacgattttcgtgctggtcttaaaatcatgttagacggcgaaccttacgcggttgaagcgagtgaattcgtaaaaccgggtaaaggccaggcatttgctcgcgttaaactgcgtcgtctgctgaccggtactcgcgtagaaaaaaccttcaaatctactgattccgctgaaggcgctgatgttgtcgatatgaacctgacttacctgtacaacgacggtgagttctggcacttcatgaacaacgaaactttcgagcagctgtctgctgatgcaaaagcaattggtgacaacgctaaatggctgctggatcaggcagagtgtatcgtaactctgtggaatggtcagccgatctccgttactccgccgaacttcgttgaactggaaatcgttgataccgatccgggcctgaaaggtgataccgcaggtactggtggcaaaccggctaccctgtctactggcgctgtggttaaagttccgctgtttgtacaaatcggcgaagtcatcaaagtggatacccgctctggtgaatacgtctctcgcgtgaagtaatgcggttgtggtgcggcctgcaggctgcaccatcacttattcaggtcagagatgatgaaacgccttatcgttcttgttttgcttgccagcacgctgctcacgggctgtaacaccgctcgcggtttcggcgaagacatcaaacatctcggcaactccatctctcgcgctgccagctaatttttcttctcttccgaaaaatcatcagattcccatcatttttggcgatgttgtctattattaatttgctataggcaaacataaataacattacctaaaaggaagacgttatggtgaagaagacaattgcagcgatcttttctgttctggtgcttagtacagtattaactgcctgcaacaccacgcgtggcgttggtgaagacatttctgatggcggtaacgcgatttctggcgcagcaacgaaagcgcagcaataagcaataacggtacgacagctgtgtcgtgccgtttgttttttctgcgatagtcacaaaggtaatagttgaaattcccctgccacctggcaaaatatccgttcaaccatcagctttgcaggacgacctgcaaacgcctcttttcaccggggacggccccaattctccggagcctgatatgtcctggattatcttagttattgctggtctgctggaagtggtatgggccgttggcctgaaatatacccacggctttagtcgtttgacgccgagtgttattactgtgacggcgatgattgtcagtatggcgctacttgcctgggcgatgaaaagcttaccagtagggacggcttatgccgtgtggacgggtattggcgcagtcggcgcggccataaccggcattgtgctgctcggtgagtccgctaacccgatgcgcctggcgagtctggcgttaatcgtattggggattattggtctgaaactcagcactcattaactaccaggctgctgtacccaaataaatttactgacatcaaacccttcccgggtcgcgactgccagcatctcctgtttcacttcgtcagaaatggttggcgtgcgggagagtatccacaggtagtcgcggtccgggccgcaaaccagcgcatggcggtattcccgatcgagtgcaataacgttataaccgccatagaaaggaccaaagaaactcactttcagcgcagcgcgagttggtgcgccggtaaagtacgctttcccttcactctgctgccacattcctctgtcagggttatagcctttattaatgacattcaggccgccgtcatcacgcaggctgtatgttgcggtgactttttccagtccacgttcaaagcggtgatcaaaacgggcaatctcataccaggtaccgagataacgtttggcgtcgaaattatttactacggtcacgccacgcggcggcgtaggagaactgcaggcaacgaccagaaatgcagctgtcgctgcggcaacgagagggagcaggcgcataaatgtttccttactggtttttttctaagtgtagatgacagcaaggaaaagcggagaaaaggtccgaaaattcggacccgatggaattttactgtagagcgttaagaatctgccaggcggcgtcgactctcgctggattgggatagtttttgtttgccagcatcacgatacccagctctttttctggaataaacgcgacatagctaccaaatccgccggtcgcccctgttttatgtacccaacttgcgcgtactgcaggagttgggggcgtaatcgcttttacggggcgtgctgccagtgcaattttattgtcactgccgttaatgatgctgtcaggatttaccggccagtccagcatttcccagcccaggccctgatacatatcgccggtttgccagtagcgagattgtgccagttgtatcccttgttgaagcgttttctcattgatatcaaggggttttaaattgctttgcacccagcgggccatatcttcaatggtgctcttcacaccataagcttcagcatctaacgccccagggctaacatgcactgccttaccttcgcgatatccccaggcgtaattcttttcttctgcgggcggtacattaatccacgtatggttgagtttgagtggctggaagacacgagtttgcatcgcctgctcaaaactcaaaccagacggcttcacagccagtgcgccgaacaaaccgatactggagttggcatacagacgttgtgttcctggagcccatgcaggctgccagttttgatagaagcgcagcaagtcgctactggatttcacctcatccggcacctgcaatggcaggccgccagcagtgtaggttgcgagatgtaatagtgtgatcccattccactgtttagcggtaagttcaggccagtattttgttgtgggatcgcttaacttgatttcccctcgagcaatagcgtcgccaccaagcacgccagtaaatgttttgctgacgctacctaactcaaacaacgtttgctgtgtgacgggctgctttttggcgatgtccgcatagccccaggtaaagtaataaggtttaccctgataaattaccgccaccgccatacccgggatcttttgttgctctataagcggggtaattgtgcgatgcacaatatcgttgatttgttgaggggcagcaaatgtggagcaagaggcggtaattaataaggcgcagagcgtcgttttgaacatagggtctggtttccatacaaaacggcccgccataggcgggccggatttacattggcgatgcgttagattgtaacgacaccaatcagcgtgacaactgtcaggatagcagccagaccgtagaaaacccatttgcccgcaggtacgtggattttcagatcgtgcatcgcgtggtgcatacggtgtaaaccacaccacagcggcagaacgatcatcaggaacaggaatacgcgaccaatgaagctctgcgcgaacgccagaacgcgctcgtagctcagcgcatcacccggaaacaaccccagtggcagcagaatacccaccagcaggatcatcaccggcgcaatgatggcgctccacataccaccggccccgaagaggccccagaataccggttcgtcagaacgctttggatttggattaatcatctcaggctccttaccagtacagggcaacaaacaggattacgatggtggcaaccacagttaccgcccagagacttttgataattggctctggtcccattttttcgtcttttacaatgatattggccgctttcggtgccagttcaaaccaggttttggtgtgcagcagagctgccgccagagtgatcaggttaatgatcacgataaccgggttttgtaaaaagtcgacgaatcccgcccaggcttccgggccatttttcagggcaaacagcccgaaaatcagttcaatgctgaaccacacagccggaaccgccgtgccttcgcgcagcatgtaaaagcgataaaacggcaattttttccaccaggtggacgtcattggccgtacatacggtttacgtttagtcgtcatgttgcactccttagcgtggtttcagggtcgcgataagaaagtctttgctactttctactttgccctgctgaatggccgcagccggatcgacgtgtttcgggcagacttcggagcagtagcccacgaaagtacagctccatacgccgttctggctgttcaactgcgccatacgctccttcttaccgtggtcgcggctatcttcgttataacgatgcgccagcgtaatggcagccggaccgatgaactctgggttcaggccaaactgcgggcacgcggcgtagcacaaaccacagttgatgcaaccggagaactggtgatacttcgccatctgcgccggggtctggatgttagtaccctgatccgcggtgcgggagttgccgatgatgtacggtttgatcgcttccagactttcgatgaagtgggtcatatcgaccaccagatcgcgttcaatcgggaagttagctaacgcttcaaccttcataccgtcggtgtaatcacgcaggaaggttttacatgccagttttggcacgttgttaaccatcatgccgcaggaaccacaaatcgccatacggcaggaccagcggtagctcaggtccggtgccaggttgtctttgatgtagcccagcgcatccagtaaactggtagttgcgtcataaggcacttcatagaatgcgctatgcggtgcggtatcgacttccgggttatagcgcaccacctcaattttcaggtttttcatctcagccattcgccttctccttcttattggctgcttccgccttatcggctgcatccgcttcgccaccgtaaacgcgtttagctggcggcagcgtagtaatcttcacgtcgctgtactccaggcgagtcgtgccatcagcatcgcggaaggcgagggtgtgtttgaggaagttgacgtcgtcacgctcggtgcaaccttcgtccagacgctggtgcgcgccgcgggactctttacgtgccattgcggagtgcgccatacattcagcaacgttcagaccgtggcccagttcaatggtgtagagcaggtcggtgttgaacacgctggaagtgtcggtgatgcgcacgcgcttgaagcgttcctgcagctctgccagcttgtcgatggttttctgcatcagttccggcgtacggtagataccgcagccttcttccatagccaggcccatttcgtcgcggatcttcgcccagttttcgccgccatcctggttaaccagatctttcagacgttgttcaacgccagctgcctgcgcttcaattgccgcttcgttgccattaccggcagttgctgcacgctctgtcgcttgttcaccggccagacggccgaagaccaccagttccgccagggagttagaacccagacggtttgcaccgtgcagaccaacagaggaacattcacccacggcgaacagacctttaatgcgggtttcacagttctgatcggtttcgataccgcccatggtgtagtgtgcggtcggacgtaccggaatcggttctttaaccggatcgacgccaacgtacgctttcgccagttcgcagatgaacggcagacgttcatgcagttttttctcgccgaggtgacgcaagtcgagataaaccacatcgccacgcggcgtggagatggtgttgcctttacgccattcgtgccagaaggcctgagagactttgtcgcgtggacccagttccatatatttgtttttcggctcgcccagcggagtttccgggcccatgccgtaatcttgcagataacggtagccatttttgttgaccagaataccgccttcaccgcggcaaccttcggtcatcaggataccggaacctggcagaccggttgggtgatactgaacgaattccatgtcacgcagcggaacgccgtggcttagcgccatacccataccgtcaccggtaacgatgccgccgttggtgttgtaacgataaacgcgacccgcaccgccagtagccataacgaccgcgttagcacggatctgcaccagcgtgccttccatcatgttcattgctaccaggccgcgaacatgaccatcatcaaccagaatatccagcacgaaatgttcgtcaaaacgctggatctgcgggaattgcagagaggtctggaacagcgtgtgcagcatatggaagccggtcttatcggcggcgaaccaggtgcgctcgattttcatgccgccgaagcgacgtacgttgacgctaccatccgggcgacggctccatgggcatccccacagttccagttgggtcatttcggttgggcagtggtggacgaaataatccacgacatcctgctcacacaaccagtcgccacccgctactgtatcgtgaaagtgatattcgaagctgtcatgatcctgcgcgacagcggcggagcccccttctgcagcaacggtatggctacgcatcgggtatactttactgattagtgcgatttttgcattcggatttgcctgcgcggcagcaattgcagcacgtaatcccgcgccaccggcgcctacaatggcaagatcggcttgaaaggtttgcacgacattcctccagattgtttttatcccacagccacgtacttcagggtaagtacctgaaagttacggtctgcgaacgctattccactgctcctttataggtacaacagtatagtctgatggataagtctgaaatttgacgagatcgatttttttagtgcgcaagagggctaaattatcactgaagatgattaatttaattactaaaccatcagatcgtgctttttttagtcactgcccaccgctgtttgattcctgcgtaaaatttgtctcgccgtcgcgttgcgagtagacttcgtgcccttgtcaaaaactggagatttaactatgagcgaaacggcatcctggcagccgagcgcatccattcctaacttattaaaacgcgcggcgattatggcggagatccgtcgtttctttgccgatcgtggagtgctggaggtggagacgccttgtatgagccaggcgacggtaaccgatattcatttggtcccgtttgagacacgtttcgttggccccgggcatagccaggggatgaatctctggttaatgaccagcccggaataccatatgaaacgcctgctggttgccggttgtgggccggtattccagctgtgccgcagcttccgtaatgaagagatggggcgttatcacaaccctgagttcactatgctggagtggtatcgaccgcactatgatatgtaccggttgatgaacgaggtggacgatctcttacaacaggtgctggactgcccggcagcagaaagcctttcttatcaacaagctttcttgcgttatctggaaattgacccgctctctgccgacaaaacgcaactgcgggaagtcgcagcgaaactggatttgagcaatgttgctgataccgaagaagaccgcgacacgctgctacaattgctgtttacctttggcgtagagccaaatattggcaaagaaaaaccgacctttgtgtaccactttccagccagccaggcaagtctggcgcaaatcagtaccgaagatcatcgggtcgctgaacgctttgaggtttattataaaggtattgagctggcgaatggtttccatgaattgacggatgcccgtgagcagcaacaacgctttgaacaagataaccgtaagcgcgcggcgcgcggtttgccgcagcaccccattgaccagaatctgattgaagccttgaaagtcggtatgcctgactgttccggcgtggcattaggtgttgatcgtctggtgatgttggcgctgggcgcggagacactggctgaagtcatcgcctttagcgttgaccgggcataattctgaaaaattactgaattaacagcgaagaatggcgtgataagcgccattctgtagcatatgttttcatttttccgttaaaggccacaatttaagactggatatttgatatcatccaggtatcaattctgtattggtttttacgctgcctgctcaatgttgcgcagtgcagttcagtgggcacgtgttatacacgcgctgaaatgaaggatggtttcatgcctcacacgataaaaaagatgagtctgataggactcatattgatgatctttacttccgtatttggatttgccaatagcccaagcgcttattacttaatgggttatagtgcgattcccttttatatattttctgcattgttattctttattccattcgccttaatgatggctgaaatgggagctgcttatcgcaaagaagaaggcggtatctattcctggatgaataatagtgtcggaccacgttttgccttcattggtacgtttatgtggttttcctcttatatcatctggatggtgagtacctccgcgaaagtttgggtaccgttcagtacattcctctatggtagcgacatgacccagcactggcgtattgccggactggagcctacgcaggtggttggtctgctggctgtggcatggatgattctggtcaccgtcgttgcttctaaggggattaataaaattgcccgcattactgcggtgggcggtattgcagtaatgtgtctgaatttagtattgctgttagtaagcattactattttgttattaaatggtgggcatttcgcgcaggatattaatttccttgcaagtccgaacccgggttatcagtccggtctggcaatgctaagctttgtggtatttgccatttttgcctatggcggaattgaagcggttggtggtctggtcgataaaacggaaaatccagaaaagaactttgccaaaggtattgtttttgccgctattgttattagtatcggttatagcctggcaatatttttatggggcgtcagcacaaactggcagcaggtattaagtaatggttccgttaacctcggcaatattacctatgtgctgatgaagagccttgggatgacgctgggtaatacactgcatttgagtcctgaagcgagtttgagcctgggcgtatggtttgcgcgtattactggacttagcatgttcctcgcctataccggtgcgttctttacgctttgctatagtccgttgaaagccatcatccaggggacgccgaaagcattgtggccggaaccgatgacgcgcctgaatgcgatggggatgccgtctatcgccatgtggatgcagtgcgggttggttactgtcttcatcctgctggttagctttggtggcggtaccgcaagcgcgttctttaacaagctgacgctgatggcgaacgtgtctatgacgcttccttacctgttcctcgcgctggctttcccgttctttaaagcacgtcaggatctcgacagaccgtttgtgattttcaaaacgcatttgagcgcaatgattgcgacagtggttgtcgtactggtggtgacatttgcgaacgtcttcaccatcattcaacctgtggttgaagccggagactgggacagcacattgtggatgattggcggccctgtcttcttcagcctgttagcgatggcgatttaccagaactattgcagcagagtggcaaaaaatccgcagtgggcggtggaataacccgatgccctatcgtctacctgacgatagggcgtaaagacaggaaatgttatggatgacaccagccgggacccggcaataaccgaagatgaaatcagggcgctgcaattttctgccggggatgtagcggaaatagagcagacgattctctcttttgtcgatgcctgccacacccgtaaagtggcgatggtggtgggtagcaccattaacaccctcaaagatcgcgatggtaaacggtggggaaacctgccggatatttattgcgcttatcttatccgatgtctggtttttcgcggggaattagtgggatacggcgatttgtttcgtatgcgctatagcgaaattaagcgaccggttaccttatgagtgcgcgcatgtttgtcttatgctgcatctggtttattgtggcgttcctctggataaccatcacttccgcgctggacaaagagtggatgattgatggacgcgggattaacaacgtctgcgatgtgttgatgtatctcgaagaagacgatacccgtgatgttggtgtgataatgacgttaccgctctttttcccttttctctggttcgctttgtggcgaaaaaaacgcggctggtttatgtacgccaccgcgctggctattttcggctactggctgtggcagttttttctgcgctatcagttttgtttgtgagccggattggttcatccggcacacaaacttacaaacttcccgcctgacgacctttgcccgcagacgtcagcgttctccccgtttgtttaccgttgaggctttccagacgcatctggaagggcgggaatggcatatcgataccgtgggcatggaagccagccagaatcagctggtggatctcatggcgtagcggcatacggtgacccatctcagcggcgtaaatacgcagctcgaaaatctgaatcccctgttgcagatccaccaggaagacttccggtgccgggttgtcgatcaccaggctgcagcgacgcgctgcggtgagcaggatttccgtcacttcttcgctattggcatcggcaggggccggtatcgtcaacaccacgcgcgtgacgctgtcagagaggctccagttgataaactgctcggtaataaacgccttgttcggcacgattatctctttacggtcccagtcgctgatggtggtggcgcgggtgttaattttcgtcacgctaccggtgagatcgcgaattgtcaccgtatcgccaatgcgaatcggtttttcgaacaggataatcagaccagagataaagttggcgaaaatttcctgcaaaccaaaaccgagaccaacaccgagcgcggcaaccagccactgcaatttgctccactcaataccaatcatactgaagccgaccagcccgccaatcagcatcagcagatatttggtgatggtggtgatggcgtaacccgtacccggcgttaaatccaggtgctgcaaaatcgccagttccagcagcgcgggcaagttgcgcaccagctgcgtggtgatgataaacaccagaatggcaatcagcaccgcaccgagggtaattggctccagactttctacgccctgtaccgtggaggtgacatcccacaggctaatattttcgaggaagccgaaagcggaatggatttcactccacagcacaatgacagaaagcagggcgatcaacatcaaaatactgcgcaccagccgcaaggattgcgcactgatggcatcgagatcgacttcgctttcatcgacttcaattgctccttccgggctactgtgatgatgcgcttcctcttcgccacgcgcacgttgcgctaacatctctgcccggcgatgcttcgcccgatcaaacgccagcctgcggcgctggatcagcatccagcggcggataacgtgataaaccaccagtagcaggaaccagatggcaacgctggtttcaagcctcgctaacagcgcctgtgccgttgccagataacccaccgcgctcgccagaatggcaaccaacggcgcgccaatcatcatgttccacagcatatggttggtaatgttgtcgccgctgccctctttgttgagatacagcggaatcccggcctttttcaggctgagggtgaccaccgccagcgcaccgcaaatgaggataaagcaaagccgtcccaggctaccggagaattcacggtcgtcgaggttatcgaacatcatcagcgccataatcagcggcacaataagcccgatgctcatcaggtagtagcgcatcccacgggaaacacgttcgcgcggccagccaaaatgagcgataaacaagccgttcgggcgggcaaaggtggcgcaaatcatcactacccacagcagcggcacggtggccgttacaccatcgccaatcgcgaccgccagcggataaggccacgcctcgcgcaagccgtaacccagcgtcatccacagcaccggtaacggactcgcgacgagaatgctccagaaaagagtgcgcaacgtcagccagaagtgatcctgagtcactttgccaactttcgccgcgctacgttcaagaaaacgggtgaaatagcggcggctgtaaatactgcaaccgaccagaatcaacgcgccaaacagcggcaaaattgtctctttgctggtcagcatcatcacactggctttgcccaactgactgaaggtgtccaggctaatgagacgacgcagatcctgggcgatttccagcggccaggcgatggtcatcgggcgcacgtcagaggtccagaacagatagcggtgcgttgcttcgttcacctctttcagcgcatcctccagttgcccgttggagactttcagcttggtcagttccaatagtagcgtgtcgccaccctgcaacaaactgttcagcaactcacgctgagtgcgcagttgtgcttccagaatacggttttgctcggcagtcagcggctgaccgtcggcctgatgaatttgccgtagcagcggctgtttattaagcagatcctcataacgtaaccgttgcacacgcaactgcgccatttcggtatcaagctgttgtggtttcggcatttccggcagccgtgccacctgcgcccgcagcgcttcgccgagcagattggagcttcccagccattggctctgttcacgcagcgtattcaacgcctgccggacctgtaacgtctggctggcagcctgacgctgttggctggcaacgagatccatccgctgcgcctgttgattcaaagccgcgcttagttcgcggttaattttgaattgcgcgacgatatctttcggcaaatcggcgctgttttctgccagcaattcggtactttccagcgcccgctccgcctcaagctgacgttggctgtttaattgattacgcaaggcctgcaaatacgcatccagttgctggctctctttttccgccagctcactgcgtaagcgcgctaattcctggcggttattggcagacagctgcgccagctccagttcatcaacgagcgccttaagacgtgcagagtcagactgcaacgcgaaattttgtgcctgattgagcggagtattgccggtaagcgttcccaggcggcgctcgatctcatttaactgacggcgggcgtcggtttgctgttgcggcagttgattcaggctatcggcaatctcgcgggcgcgctcctgctcttgctgggcctgacggcttttatccagcaactggctgctgacctggagaatttcctgattcagcgcgtcggtagacattcccgggctcacgctgcgcggctcgtcacgcatgttgtttaattgtgcgcgcagagtagcggagagtttcggataattatcgataacttgctgatattgtttgatgcgctcaagggaaccttttcgttcctcaagcgcatttaaggcagactggagcgcctctacgacttccggctgtgcgggtttcgccgcttttgcctgctccagttcctgagtgatttgtttgctatcgggggccgtcgcggcgtacgccccccaactgaggcaccaggccatcagaaaagtgataatcaggcgcacgtcagcgtttcctttgatggattagacctggtcttttttgtcgtcaaccaatgggctggcgtcgtgttctgcttcgatctcttcagcaggaagcggggcaggttcagcgtctggcgtaacaaaggtttcggtagatactgccagcggctggccaattttcgtgacagacaggctttccagttgctcaaccagattcactttacccggtgcaaacaggttgataacggtggaaccgagtttaaagcgacccatttcctggcctttcagcagtgccacagaaccgtcgttttccccggcaggccaggtccagcgcttgatgataccttcgcgcggcggcgtaatggtgcccgcccagaccgtctcaatgctgccaacaatcgtcgctccgaccagaatctgcgccattgggccaaattcggtatcgaaaaggcaaatcacgcgttcgttacgggcaaacagattcggcacgttctgagccgtgagatggttaacggagaagagatcgcccggcacgtagatcatctcacgcagaataccgttgcacggcatgtgtacgcggtggtagtcacgcggggagaggtaagtggtcacaaacgtaccgttgcggaacaggtccgccatcagatagttgcctgccagcagggcttcgaggctgtagttgtggcctttggcttgcaggattttatcttcttcgattttacccaactggctgataacgccatcggcaggcatgaccagtacattcggatcggtatcgattgggcgtacttcgtcacgcagcggacggacaaagaattcgttaaaggtgcggtagctggcggtgtccggcttttgcgcctctttcatgtcgaccttgtagtatttaacgaacagatcgataaccagttttgtcagccatcctgcccgcttgcttgcgccccaacccgccaggcgagtaagccatagtttcggcagaatgtactgtaggctaagtttaaaactatttaacaaggtagcctccaggccattgttttgtcgttcctgatccggcctacatgccggatcctgaaaaaaaggggacgattctaacgacggttagcttaattgtcagtcatccgtatcagaaaagtttttacgcgtttttacctgcgccatgctttccagaatacggtgatagttttcgaaacgggtttccgcgattttcccttcctcaaccgcttcccggatagcgcagcccggatcggtatcgtgtttgcaatcgcgatatttacacagacctaaatagtcatggaattcgacaaagccctgagtgatttgttccggctccaggtgccagaggccgaactcacgcactcctggggagtcaatcacatcaccgccgtgcgggaagtgatacagccgagcggcggtcgtggtgtgctgaccgagcccgctgttgtcagagatatcgttggtcaggatctctttttgcagccccagcaacgcattcagcaggctggatttgccgacgccagactgcccggcaaaaatgctgatgcgcccggtcaacgcctcttccagcggttttagcccatcctgagtatggctggaaaccatcaatacgcgataaccgatattgcggtagatatccatctgctcgttgacgaacgccatgccttcgtcgtccagcaggtctatcttgttgagcacaataatcggctcaatctgcaaggtttcgcaggccaccaggtaacggtcgataatattgaggctcagctccggcaaaatggcggagacaatgacaatctggtcgatgttggcggcaataggttttacgccgtcgtagaaatccggacgcgtcaacacgctggtacgctcatgcaccgcttccacgatccctttgacatttacgccttccgccgccggtttacccggacgccagactacgcggtcgccggttaccaggctacggatggtacggcgaatattgcagcggtgaacgtcgccatcggcggattccacatcagcgtgcataccaaagcggctgatgacgataccttcatcaggctcgccaaacagattgtcgtcgtagtcgggcttctccttagacgttttaagacgacgctggtgattggcgttcacgcggcgctgctggcctttggagagtttatttttactcaatcgtacagactcctggtcgcccctgatgggcaaaacatctatgatacacgcaattgtggatcaatatagtcactgtgaatgggtggaaaatagcatgagtgccaatgaaaacaacctgatttggatcgatcttgagatgaccggtctggatcccgagcgcgatcgcattattgagattgccacgctggtgaccgatgccaacctgaatattctggcagaagggccgaccattgcagtacaccagtctgatgaacagctggcgctgatggatgactggaacgtgcgcacccataccgccagcgggctggtagagcgcgtgaaagcgagcacgatgggcgatcgggaagctgaactggcaacgctcgaatttttaaaacagtgggtgcctgcgggaaaaagcccgatttgcggtaacagcatcggtcaggaccgtcgtttcctgtttaaatacatgccggagctggaagcctacttccactaccgttatctcgatgtcagcaccctgaaagagctggcgcgccgctggaagccggaaattctggatggttttaccaagcaggggacgcatcaggcgatggatgatatccgtgaaagcgtggcggagctggcttactaccgcgagcattttatcaagctgtaaaatttttcctggtcacgtaagcgccggaatccacttgcggcggcgtgattttgacgctaaattgaacgtcttgctgataatttcagcacttgagataaaaacgcaaaaaaaacttttttggggggttgcagagggaaagatttctcgtataatgcgcctcccgtaacgacgcagaaatgcgaaaattacgaaagcaaaattaagtagtacgcgggaatagctcagttggtagagcacgaccttgccaaggtcggggtcgcgagttcgagtctcgtttcccgctccaaaatttgaaaagtgctgcaaagcacagaccacccaagcgggaatagctcagttggtagagcacgaccttgccaaggtcggggtcgcgagttcgagtctcgtttcccgctccaaaatttgaaagtgctgtaaggcacagaccacccaagcgggaatagctcagttggtagagcacgaccttgccaaggtcggggtcgcgagttcgagtctcgtttcccgctccaaattcttctctcaataaaatatccacagcgacgcgatgcgttattgctggtttttgttgtctctgacaaactcttgtaaacagagttatccacagcctcaggctgtaatcttaatttcaaagaaacttcgcacggtgaatagtatttttttaacctattgatagataagttaaaaattaagattccgttttgtcgagtcgatcacttgacgattttattcgtcttgaattgcaatgcgtttttatttttattcacaagctgtggatgaatcaggcgtcacgcggtaaccctttttcaatcacccgaaccagacgctgttttttcggcaattgcacttcgactatgcacgcatttcgtctctctatttgctgcgcaatcgcccacgctatgtgctcatcgagaagtgggtgctcacctttacgactttccagcgctgtcaaaatcgtttcatcccaaggggcattgcctaatgctacggcgatattacgcagccaacgcaggtgaccaatacgacgaatcgcgcttccttccgtgacttttaaaaacttctcttcgctccaggcgaataactcaatgagttccggtgcgtgtagcggcttacgcgggctgaaatcctcttctgtggtgagttgactatagcgattccacgggcagataagctggcagtcatcgcaaccgtaaatacggtttcccattaacggtcgcaactcttccgggatcgccccttcaagttcgatggtgagataagagatacagcggcgagcatcgacggtatatggctcgacgatggcaccggtcgggcaaatcgtcatacaggccacgcatttgccgcatccttcctcgactggttgatccacgggcagcggaatatcgaccagcaattcgcctaaaaagaagaagctaccggcctcgcgattgaggataagactgtgcttacctgtccagccgagcccagctttttcagctaacgggcgctcgagaataggcgcagaatcgacaaacggtctaaaattcaggctaacacaatgttgctgaatcatctcgcccagctttttgagtcggttgcgcagaagtttgtgatagtcacggcccagcgcataacggctaacatagccgagtttggggtttttcagcgtgctggcaaatgcggcgttagcaggaaggtaattcatccgcacgctgatcacgcgcagcgtaccgggcaataactcatgagggcgagcgcgcagcataccgtgacgtgccatccagtccatttcgccgtggtattgtttgtccagccatgcttgcagtttgggctcggactcgctgagatcggtatcggtaatacctacctgctgaaagcccagttccagcccccactgtttaattttttgcgctaactgattgagatcgaggggctcactcatgacggaccatacaatgaagaaaaaccccgtaagtataccacacaccgtctggtacgccgacgatatccgccgcggagaacgcgaggcggcagatgtgctggggctcacactctatgagctgatgcttcgcgctggcgaggccgcattccaggtgtgtcgtagcgcgtatcctgacgcccgccactggctggtgctgtgcggtcatggtaataacggcggcgatggctacgtggtcgcgcgactggccaaagcggtcggcattgaggtcacgttgttggcccaggagagcgacaaaccgttgccggaagaggccgcgctggcacgcgaagcatggttaaacgcgggtggcgagatccatgctagcaatattgtctggcccgaaagcgtagatctgattgttgatgcgctgctcggtaccggtttgcggcaagcgccccgcgaatccattagccagttaatcgaccacgctaattcccatcctgcgccgattgtggcggttgatatcccttccggcctgctggctgaaactggcgctacgccaggcgcggtgatcaacgccgatcacaccatcacttttattgcgctgaaaccaggcttgctcactggaaaagcgcgggatgttaccggacaactgcattttgacagtctggggctggatagttggctggcaggtcaggagacgaaaattcagcggtttagtgcagaacaactttctcactggctaaaaccgcgtcgcccgactagccataaaggcgatcacgggcggctggtaattatcggtggcgatcacggcacggcgggggctattcgtatgacgggggaagcggcgctgcgtgctggtgctggtttagtccgagtactgacccgcagtgaaaacattgcgccgctgctgactgcacgaccggaattgatggtgcatgaactgacgatggactctcttaccgaaagcctggaatgggccgatgtggtggtgattggtcccggtctgggccagcaagagtgggggaaaaaagcactgcaaaaagttgagaattttcgcaaaccgatgttgtgggatgccgatgcattgaacctgctggcaatcaatcccgataagcgtcacaatcgcgtgatcacgccgcatcctggcgaggccgcacggttgttaggctgttccgtcgctgaaattgaaagtgaccgcttacattacgccaaacgtctggtacaacgttatggcggcgtagcggtgctgaaaggtgccggaaccgtggtcgccgcccatcctgacgctttaggcattattgatgccggaaatgcaggcatggcgagcggcggcatgggcgatgtgctctctggtattattggcgcattgcttgggcaaaaactgagcccgtatgatgcagcctgtgcaggctgtgtcgcgcacggtgcggcagctgacgtactggcggcgcgttttggaacgcgcgggatgctggcaaccgatctcttttccacgctacagcgtattgttaacccggaagtgactgataaaaaccatgatgaaagcagtaattccgctccctgaataaggaagtgactgataaaaaccatgatgaatcgagtaattccgctccctgatgagcaggcaacattagacctgggcgagcgggtagcgaaagcctgcgatggcgcaaccgtaatctatctgtatggcgatttaggcgcaggtaaaaccacctttagccggggctttttacaggctctgggtcatcagggtaatgtcaaaagccccacttatacgctggtcgaaccctatacgctcgacaacttaatggtctatcactttgatttgtaccgccttgccgatcccgaggagctggagtttatggggatccgcgattattttgccaacgatgccatctgcctggtggagtggccacaacaaggtacaggtgttcttcctgacccggatgtcgaaatacacattgattatcaggcacaaggccgtgaggcgcgcgtgagtgcggtttcctctgcgggtgaattgttgctggcgcgtttagccggttaacctttgaaaggtggcgggatgatgtatcgcatcagaaattggttggtagcgacgctgctgctgctgtgcacgccggtgggtgccgcgacgctctctgatattcaggtttctaacggtaatcaacaggcgcggataacgttgagttttattggcgatcctgattatgcgtttagccatcaaagcaaacgcaccgtggcgctcgatatcaaacaaacgggcgtgattcagggactgccgttgttgttcagcggcaataatctggtgaaggcgattcgctctggaacgcctaaagatgcacaaacgctacggctggtggtcgatcttaccgaaaacggtaaaaccgaagcggtgaagcggcagaatggcagcaattacactgtcgtctttacgattaacgccgatgtgccgccaccgcctcctccgccgcccgtggttgcgaaacgcgttgaaacgcctgcggttgtcgcaccgcgcgtcagcgaaccggcgcgcaatccgtttaaaacggaaagtaaccgcactacgggtgttatcagcagtaatacggtaacgcgtccggcagcgcgcgcgacggctaacactggcgataaaattatcatcgctattgatgccggacacggcggtcaggaccctggcgctatcggccccggtggtacgcgggagaaaaatgtcaccatcgccatcgcgcgtaaattgcgtactttgctcaatgacgatccgatgtttaaaggcgttttaacccgtgacggggattactttatcagcgtgatggggcgcagtgatgtggcacgtaagcaaaacgccaatttcctcgtgagcattcacgctgatgccgcaccgaaccgcagtgcgactggcgcttccgtatgggtgctctctaaccgtcgcgccaacagtgaaatggccagctggctggagcagcacgagaaacagagcgagctgctgggtggggcgggtgatgtgctggcgaacagtcagtctgacccctatttaagccaggcggtgctggatttacagttcggtcattcccagcgggtagggtatgatgtagcgaccagtatgatcagtcagttgcaacgcattggcgaaatacataaacgtcgaccagaacacgccagccttggcgttctgcgcagcccggatatcccaagtgtactggtcgaaaccggttttatcagcaacaacagcgaagaacgtttgctggcgagcgacgattaccaacaacagctggcagaagccatttacaaaggcctgcgcaattacttccttgcgcatccgatgcaatctgcgccgcagggtgcaacggcacaaactgccagtacggtgacgacgccagatcgcacgctgccaaactaaggacgattgatgccaattcaggtcttaccgccacaactggcgaaccagattgccgcaggtgaggtggtcgagcgacctgcgagcgtagtcaaagaactagtggaaaacagcctcgatgcaggtgcgacgcgtatcgatattgatatcgaacgcggtggggcgaaacttatccgcattcgtgataacggctgcggtatcaaaaaagatgagctggcgctggcgctggctcgtcatgccaccagtaaaatcgcctctctggacgatctcgaagccattatcagcctgggctttcgcggtgaggcgctggcgagtatcagtagcgtttcccgcctgacgctcactagtcgcaccgcagaacagcaggaagcctggcaggcctatgccgaagggcgcgatatgaacgtgacggtaaaaccggcggcgcatcctgtggggacgacgctggaggtgctggatctgttctacaacaccccggcgcggcgcaaattcctgcgcaccgagaaaaccgaatttaaccacattgatgagatcatccgccgcattgcgctggcgcgtttcgacgtcacgatcaacctgagccataacggtaaaattgtgcgtcagtaccgcgcagtgccggaaggcgggcaaaaagaacggcgcttaggcgcgatttgcggcaccgcttttcttgaacaagcgctggcgattgaatggcaacacggcgatctcacgctacgcggctgggtggccgatccaaatcacaccacgcccgcactggcagaaattcagtattgctacgtgaacggtcgcatgatgcgcgatcgcctgatcaatcacgcgatccgccaggcctgcgaagacaaactgggggccgatcagcaaccggcatttgtgttgtatctggagatcgacccacatcaggtggacgtcaacgtgcaccccgccaaacacgaagtgcgtttccatcagagccgtctggtgcatgattttatctatcagggcgtgctgagcgtgctacaacagcaactggaaacgccgctaccgctggacgatgaaccccaacctgcaccgcgttccattccggaaaaccgcgtggcggcggggcgcaatcactttgcagaaccggcagctcgtgagccggtagctccgcgctacactcctgcgccagcaagtggcagtcgtccggctgccccctggccgaatgcgcagccaggctaccagaaacagcaaggtgaagtgtatcgccagcttttgcaaacgcccgcgccgatgcaaaaattaaaagcgccggaaccgcaggaacctgcacttgcggcgaacagtcagagttttggtcgggtactgactatcgtccattccgactgtgcgttgctggagcgcgacggcaacattagtcttttatccttgccagtggcagaacgttggctgcgtcaggcacaattgacgccgggtgaagcgcccgtttgcgcccagccgctgctgattccgttgcggctaaaagtttctgccgaagaaaaaagcgcattagaaaaagcgcagtctgccctggcggaattgggtattgatttccagagtgatgcacagcatgtgaccatcagggcagtgcctttacccttacgccaacaaaatttacaaatcttgattcctgaactgataggctacctggcgaagcagtccgtattcgaacctggcaatattgcgcagtggattgcacgaaatctgatgagcgaacatgcgcagtggagtatggcacaggccataaccctgctggcggacgtggaacggttatgtccgcaacttgtgaaaacgccgccgggtggtctgttacaatctgttgatttacatccggcgataaaagccctgaaagatgagtgatatcagtaaggcgagcctgcctaaggcgatttttttgatggggccgacggcctccggtaaaacggcgttagccattgagctgcgtaaaattttaccagtagagttgataagcgttgattctgcccttatttacaaagggatggatatcgggacggcgaagccgaacgctgaagagttactcgccgcgccgcaccgattgctggatattcgcgatccgagccaggcttacagcgctgctgattttcgccgcgatgcgctggcggaaatggccgatatcaccgcggcggggcggatcccactgttagtgggcggtacgatgttgtatttcaaggcattgctggaagggttgagcccgctaccgagcgcagacccggaagtacgggccagaattgagcaacaggcggcagagcaaggttgggagagtttgcatcgtcaacttcaggaggtagatccggttgcggcagcaaggattcatccaaatgatccacaaaggctttcccgggcactggaagtttttttcattagcggtaaaactttaacggaactgacgcaaacgagtggagacgctctaccgtatcaggtgcatcagttcgccatcgccccggcgagccgtgaactgctccatcaacgcattgagcagcgttttcatcagatgttggctagtggttttgaagcagaagtccgggcgctttttgcccgaggagatttgcatacggacttgccttccattcgttgcgtgggttatcgccagatgtggtcttaccttgaaggcgaaatcagttacgatgaaatggtttatcgaggtgtttgcgccacgagacagttggcgaagcggcagataacctggctgcgtggttgggaaggggttcactggcttgacagtgaaaaaccagaacaggcgcgtgacgaagtattacaggttgttggtgctatcgcaggctgaatgtgtacaattgagacgtatcgtgcgcaattttttcagaatcgaaaggttcaaagtacaaataagcatataaggaaaagagagaatggctaaggggcaatctttacaagatccgttcctgaacgcactgcgtcgggaacgtgttccagtttctatttatttggtgaatggtattaagctgcaagggcaaatcgagtcttttgatcagttcgtgatcctgttgaaaaacacggtcagccagatggtttacaagcacgcgatttctactgttgtcccgtctcgcccggtttctcatcacagtaacaacgccggtggcggtaccagcagtaactaccatcatggtagcagcgcgcagaatacttccgcgcaacaggacagcgaagaaaccgaataaggtttcgggctgtttttttacacggggagccagcgatcctgcgttccccgctgatctatttagagggttatacgcttgtttgaccgttatgatgctggtgagcaggcggtactggtacacatctattttacgcaagacaaagatatggaagacctccaggagtttgaatctctggtctcttccgccggtgtcgaagcattgcaggtgattaccggtagccgtaaagcgccgcacccaaagtattttgtaggtgaaggtaaagcagttgaaattgcggaagctgtcaaagcgacgggtgctagcgtcgttctttttgaccatgccctgagcccggcgcaagagcgtaacctggagcgtttgtgcgagtgtcgtgttatcgaccgcaccggccttattttagatattttcgcccaacgtgcgcgtacccatgagggtaagttgcaggttgagctggcgcagctgcgccatctggctacgcgcctggtgcgtggctggacccaccttgaaagacagaaaggcgggataggtttgcgtggtccgggtgaaacccagctcgaaaccgaccgtcgtttgttgcgtaatcgcatcgtgcagatacagagccgcctggaaagagttgaaaagcagcgtgagcaggggcggcaaagccgtatcaaagccgacgttcctactgttagcctggtgggatataccaacgccggtaaatctacccttttcaatcgcatcaccgaagcgcgggtctacgcggcagaccagttgtttgccaccctcgacccgacgttgcggcgtattgacgttgcagatgtcggtgaaaccgtacttgcagataccgtagggtttattcgccacctgccgcacgatctggtggcggcatttaaagccacgttacaagagacgcggcaagccacattactgctgcacgtcattgatgcggcggatgtgcgtgtacaagaaaacatcgaagcggtgaatacggttcttgaagagatcgacgctcacgagatcccaaccctgctggtgatgaacaagatcgatatgctggaagatttcgaaccgcgtattgatcgggacgaagagaacaaaccgaaccgtgtctggctttccgcacagaccggagcggggataccacagctttttcaggctttgacggagcggctttccggcgaggtggcgcagcatacattgcgtctgccaccgcaggaagggcgtctgagaagtcgtttttatcagcttcaggcaatagaaaaagagtggatggaggaggacggcagcgtaagtctgcaagttcgtatgccgatcgttgactggcgtcgcctctgtaaacaagaaccggcgttgatcgattacctgatctaacggcgtagcgtctgaagcgtggagtcatatcctctggcgtcgaaagacaacagggatcaccgcataacaaatatggagcacaaacatggcgtggaatcagcccggtaataacggacaagaccgcgacccgtggggaagcagcaaacctggcggcaactctgagggaaatggaaacaaaggcggtcgcgatcaagggccacctgatttagatgatatcttccgcaaactgagcaaaaagctcggtggtctgggcggcggtaaaggcaccggatctggcggtggcagtagtagccaaggcccgcgcccgcagcttggcggtcgtgtcgttaccatcgcagcggcagcgattgtcattatctgggcggccagtggtttctataccattaaagaagccgaacgcggcgtggtaacacgctttggtaaattcagccatctggttgagccgggtctgaactggaaaccgacgtttatcgacgaagtcaaaccggtgaacgtggaagccgtgcgtgaactggccgcttctggtgtgatgctgacgagcgacgagaacgtagtgcgcgttgagatgaacgtgcagtaccgcgtcaccaatccggaaaaatatctgtatagcgtgaccagcccggatgacagcctgcgtcaggctaccgacagcgccctgcgtggagttatcggtaaatacaccatggaccgcattctgacggaaggtcgtaccgtgattcgtagcgatactcagcgcgaactggaagagacgattcgtccgtatgacatgggtatcacgctgctggacgtcaacttccaggctgctcgtccgccggaagaagtaaaagcggcgtttgacgatgcgattgccgcgcgtgaaaacgaacagcaatacattcgtgaagcagaagcgtataccaacgaagttcagccgcgtgcgaacggtcaggcgcaacgtatcctcgaagaggcgcgtgcgtacaaggcccagaccatcctggaagctcagggtgaagtggcgcgctttgctaaacttctgccggaatataaagccgcgccggaaattactcgcgagcgtctgtatatcgagacgatggaaaaagtgttgggtaacacccgcaaagtgctggttaacgataaaggtggcaacctgatggttctgccgttagaccagatgctgaaaggtggtaacgcccctgcggcgaagagcgataacggtgccagcaatctgctgcgtctgccgccagcctcttcctccacaaccagtggagcaagcaacacgagctccaccagtcagggcgatattatggaccaacgccgcgccaacgcgcagcgtaacgactaccagcgtcagggggaataacgatgcgtaagagtgttatcgcgattatcatcatcgtgctggtagtgctttacatgtctgtctttgtcgtcaaagaaggtgagcgcggtattacgctgcgttttggtaaggtactgcgtgacgatgacaacaaacctctggtttatgagccgggtctgcatttcaagataccgttcattgaaacggtgaaaatgctcgacgcacgtattcagaccatggacaaccaggccgaccgctttgtgaccaaagagaagaaagacctgatcgtcgactcttacatcaaatggcgcatcagcgatttcagccgttactacctggcaacgggtggtggcgacattagccaagcggaagtgctgttgaaacgtaagttctctgaccgtctgcgttctgaaattggtcgcctggacgtgaaagatatcgtcaccgattcccgtggtcgtctgaccctcgaagtacgtgacgcgctgaactccggttctgcgggtacagaagatgaagttactaccccggcggcagataacgccattgccgaagcggcagagcgcgtaacggctgagacgaagggcaaagttccggtcatcaacccgaacagtatggcggcgctgggtattgaagttgtcgatgtgcgtatcaagcagatcaacctgccgaccgaagtgtctgaagcgatctacaaccgtatgcgcgccgagcgtgaagcggtagcgcgtcgtcaccgtagtcaaggtcaggaagaagcggaaaaactgcgcgcgactgccgactatgaagtgaccagaacgctggcagaagctgagcgtcagggccgcatcatgcgtggtgaaggcgatgccgaagcagccaaactgtttgctgatgcattcagtaaagatccggacttctacgcattcatccgtagcctgcgtgcttatgagaacagcttctctggcaatcaggacgtgatggtcatgagcccggatagcgatttcttccgctacatgaagacgccgacttccgcaacgcgttaatataacgactgcggtacaggtcaataaagccaccgcatcctcagggatgtcggtggttttctttttctataaggataatgaatgaatagcacaatctggctggcgcttgccctggttttggtactggaaggtttagggccgatgctttacccgaaggcatggaagaagatgatctctgcgatgaccaatttgcccgataatattttacgtcgttttggcggtggacttgtggttgcgggcgttgtggtctactacatgttgaggaaaacgattggctgaacaaaaaacagactgatcgaggtcatttttgagtgcaaaaagtgctgtaactctgaaaaagcgatggtagaatccatttttaagcaaacggtgattttgaaaaatgggtaacaacgtcgtcgtactgggcacccaatggggtgacgaaggtaaaggtaagatcgtcgatcttctgactgaacgggctaaatatgttgtacgctaccagggcggtcacaacgcaggccatactctcgtaatcaacggtgaaaaaaccgttctccatcttattccaagtggtattctccgcgagaatgtaaccagcatcatcggtaacggtgttgtgctgtctccggccgcgctgatgaaagagatgaaagaactggaagaccgtggcatccccgttcgtgagcgtctgctgctgtctgaagcatgtccgctgatccttgattatcacgttgcgctggataacgcgcgtgagaaagcgcgtggcgcgaaagcgatcggcaccaccggtcgtggtatcgggcctgcttatgaagataaagtagcacgtcgcggtctgcgtgttggcgaccttttcgacaaagaaaccttcgctgaaaaactgaaagaagtgatggaatatcacaacttccagttggttaactactacaaagctgaagcggttgattaccagaaagttctggatgatacgatggctgttgccgacatcctgacttctatggtggttgacgtttctgacctgctcgaccaggcgcgtcagcgtggcgatttcgtcatgtttgaaggtgcgcagggtacgctgctggatatcgaccacggtacttatccgtacgtaacttcttccaacaccactgctggtggcgtggcgaccggttccggcctgggcccgcgttatgttgattacgttctgggtatcctcaaagcttactccactcgtgtaggtgcaggtccgttcccgaccgaactgtttgatgaaactggcgagttcctctgcaagcagggtaacgaattcggcgcaactacggggcgtcgtcgtcgtaccggctggctggacaccgttgccgttcgtcgtgcggtacagctgaactccctgtctggcttctgcctgactaaactggacgttctggatggcctgaaagaggttaaactctgcgtggcttaccgtatgccggatggtcgcgaagtgactaccactccgctggcagctgacgactggaaaggtgtagagccgatttacgaaaccatgccgggctggtctgaatccaccttcggcgtgaaagatcgtagcggcctgccgcaggcggcgctgaactatatcaagcgtattgaagagctgactggtgtgccgatcgatatcatctctaccggtccggatcgtactgaaaccatgattctgcgcgacccgttcgacgcgtaattctggtacgcctggcagatattttgcctgccgggcgaacagtgtgatacattgctgtgtcgggtaagccattacgctatccgacacagtgttaaatcctcgcttttttccttccccgaactgaaataaattagcgacacagcttgtggctggtttatcatcaatataaatgtattttttcccgatttcccttttgaggttgatgtgcagttaacgagtttcactgattacggattacgtgcgctgatctacatggcgagtttgccagaagggcggatgaccagtatttctgaagtgactgacgtctacggcgtctcccgtaatcatatggtcaaaataatcaatcaacttagtcgtgccggctacgtgactgctgttcgtggaaaaaatggcggcattcgcctgggtaaaccggcgagtgcgatacgtattggtgatgtggtgcgcgagctggagcccttaagcctggtgaattgcagcagtgagttttgccacattacacctgcctgtaggttgaaacaggcactttctaaggccgtgcaaagttttcttacggaactggataactacacgcttgccgatttggttgaagagaatcaaccgctttataaattattgctggtggagtgacgaaaatcttcatcagagatgacaacggaggaaccgagatgagtcaagatcctttccaggaacgcgaagctgaaaaatacgcgaatcccatccctagtcgggaatttatcctcgaacatttaaccaaacgtgaaaaaccggccagccgtgatgagctggcggtagaactgcacattgaaggcgaagagcagcttgaaggcctgcgtcgccgcctgcgcgcgatggagcgcgatggtcaactggtcttcactcgtcgtcagtgctatgcgctgccggaacgcctcgacctggtgaaaggtaccgttattggccaccgtgatggctacggctttctgcgggttgaagggcgtaaagatgatttgtatctctccagcgagcagatgaaaacctgcattcatggcgatcaggtgctggctcagccgctgggtgctgaccgtaaaggtcgtcgtgaagcgcgtattgtccgcgtactggtgccaaaaaccagccagattgttggtcgctactttaccgaagcgggcgtcggctttgtggttcctgacgacagccgtctgagcttcgatatcttaatcccgcccgatcagatcatgggcgcgcggatgggctttgtggtcgtagtcgaactgactcagcgtccgactcgccgcaccaaagcggtgggtaaaatcgtcgaagtgctgggcgacaatatgggcaccggcatggcggttgatatcgctctgcgtacccatgaaattccgtacatctggccgcaggctgttgagcaacaggttgccgggctgaaagaagaagtgccggaagaagcaaaagcgggccgtgttgatctgcgcgatttaccgctggtcaccattgatggcgaagacgcccgtgactttgacgatgcagtttactgcgagaaaaaacgcggcggcggctggcgtttatgggtcgcgattgccgacgtcagctactatgtgcgtccgagtacgccgctggacagagaagcgcgtaaccgtggcacgagcgtgtacttccctagccaggttatcccgatgctgccggaagtgctctctaacggcctgtgtagcctcaacccgcaggtagaccgcctgtgtatggtgtgcgagatgacggttagcagcaaaggccgcctgacgggctacaaattctacgaagcggtgatgagctctcacgcgcgtctgacctacaccaaagtctggcatattctgcagggcgatcaggatctgcgcgagcagtacgccccgctggttaagcatctcgaagagttgcataacctctataaagtgctggataaagcccgtgaagaacgcggtgggatcagttttgagagcgaagaagcgaagttcattttcaacgctgaacgccgtattgaacgtatcgaacagacccagcgtaacgacgcgcacaaattaattgaagagtgcatgattctggcgaatatcagcgcggcgcgtttcgttgagaaagcgaaagaaccggcactgttccgtattcacgacaagccgagcaccgaagcgattacctctttccgtagtgtgctggcggagctggggctggaactgccgggcggtaacaagccggaaccgcgtgactacgcggagctgctggagagcgttgccgatcgtcctgatgcagaaatgctgcaaaccatgctgctgcgcagcatgaaacaggcgatttacgatccagaaaaccgtggtcactttggcctggcattgcagtcctatgcgcactttactagcccgattcgtcgttatccagacctgacgctgcaccgcgccattaaatatctgctggcgaaagagcaggggcatcagggcaacaccactgaaaccggcggctaccattatagcatggaagagatgctgcaactgggtcagcactgtagcatggcggaacgtcgtgccgacgaagcaacgcgcgatgtggctgactggctgaagtgtgacttcatgctcgaccaggtaggtaacgtctttaaaggcgtaatttccagcgtcactggctttggcttcttcgtccgtctggacgacttgttcattgatggtctggtccatgtctctagcctggacaatgactactatcgctttgaccaggtagggcaacgcctgatgggggaatccagcggccagacttatcgcctgggcgatcgcgtggaagttcgcgtcgaagcggttaatatggacgagcgcaaaatcgactttagcctgatctccagcgaacgcgcaccgcgcaacgtcggtaaaacggcgcgcgagaaagcgaaaaaaggcgatgcaggtaaaaaaggcggcaagcgtcgtcaggtcggtaaaaaggtaaactttgagccagacagcgccttccgcggtgagaaaaaaacgaagccgaaagcggcgaagaaagacgcgagaaaagcgaaaaagccaagcgcgaaaacgcagaaaatagctgcagcgaccaaagcgaagcgtgcggcgaagaaaaaagtggcagagtgatcaataccctctttaaaagaagagggttagattgctgacaaaatgcgctttgttcatgccggatgcggcgtgaacgccttatccggcctacataatcacgcaaattcaatatattgcagagatcatgtaggccggataaacgtagtgcatcaggcaaaacgtaaacaacgagtacattaatgagcgaaatgatttacggcatccacgcagtgcaggccctgctggagcgcgcccctgaacgttttcaggaagtctttattttaaaaggccgtgaagataaacgtctgttaccgctgattcacgcccttgagtctcagggcgtggttatccagttggcaaaccgccaatatctcgacgagaaaagcgacggtgccgtgcatcagggcattatcgcccgcgtgaagccaggacgtcagtatcaggaaaacgatctgccggatctgatcgctagcctcgatcaaccgttcctgctgatcctcgacggcgtaaccgatccgcacaacctcggcgcgtgcctgcgtagtgcggacgccgcaggcgttcatgcggtgattgtgccgaaagatcgctccgcacagctcaacgctacggcgaaaaaagtagcctgcggcgcggcagaaagcgttccgctgattcgggtgactaaccttgcgcgcaccatgcgtatgttgcaggaagagaatatctggatcgtcggtacggcaggcgaggcggatcatacactctatcagagcaaaatgaccggacgcctggcgctggtgatgggtgcggaaggtgaaggtatgcgtcgcctgactcgtgaacattgcgatgagttgatcagcatcccgatggctggaagcgtttcttccctgaacgttagcgttgcgaccggaatttgcttatttgaagcggtgcgccagcgcagctaatttctcagaattatgaaaagccatccagatttggatggtttttttttgtctatagctggtaagataattacgtattgcaaatattcattttattaatatttaaacttaatctatatggaataatatatgacatggaatccgttggcgctagcgacggcgctgcaaactgtacctgaacaaaatattgatgtaacaaatagcgagaacgcattaattattaaaatgaatgattatggcgatttgcaaatcaatattctttttacttcccgccaaatgattatcgaaacctttatttgtccggtgagtagtatcagcaatccagatgaatttaataccttcttattaagaaatcagaagatgatgccgttgagtagcgtagggatctccagcgtacaacaggaagagtattacattgttttcggggcgttaagccttaaatcttctcttgaagatatcctgcttgagataaccagcctggtagataacgcattggatctggctgaaattacagaagaatatagtcactaattacaaggacgggtatttatgggaattttaaaaagtttatttacgctggggaaaagctttatctcccaggcggaagaatccattgaagaaacccagggcgtgcgcatgctggaacagcatattcgtgacgctaaagctgaactcgataaagccggaaaatctcgcgttgatctgctggcgcgggtgaaattaagtcacgataagctgaaagatttacgtgagcgcaaagccagtctggaagcccgtgcgctggaagcgttaagcaagaacgttaatccgagcttgattaacgaagttgctgaagaaatcgcgcgccttgagaatctcattaccgctgaagagcaagtgttgagcaatctggaagtctcccgtgatggcgtggaaaaagcagttacagcgacagcgcagcgtatcgctcagtttgagcagcaaatggaagtcgttaaagccactgaagccatgcagcgtgcacaacaggctgtaacaacctctaccgttggcgcatcttccagcgttagcacagcggcagaatccttaaaacgcctgcaaacgcgtcaggccgaacgtcaggctcgcctggatgctgccgcacagttggagaaagtcgcagacggtcgcgaccttgacgaaaagctggcggaagccggaattggcggtagcaataaaagtagcgcccaggatgtattagcaagactgcaacgccaacagggcgagtaatttttttgccagcctcgctaaaaggctggcaactattttaaggataaaatatgtctggttttttccagcgtctgtttggcaaggataataagccagctatcgctcgtggtccgctgggacttcatctcaatagtggctttacgctcgacacgttagcgtttcgtttgctggaagatgaattgctgattgcgctgccgggtgaggaatttacggtagccgccgtcagccacatcgatctgggcggcggtagtcagattttccgctactacactagtggcgatgagtttctgcaaatcaataccaccggcggcgaagatattgatgacattgatgatatcaagctctttgtctatgaagagagctacggtatcagtaaagagagtcactggcgcgaggcgatcaacgccaaagcgatgggagcaatgaccttaaactggcaggaaaaacgctggcagcgattttttaacagcgaagaaccgggaaatatcgaacccgtctacatgctggaaaaagtagaaaatcaaaaccatgccaaatgggaggtccataattttaccatgggctaccaacggcaagtaaccgaagatacttacgaatatttgctgctaaatggtgaggaatcttttaacgatctcggcgagccagagtggttatttagccgcgcgttgggtgtcgatatcccgctgacaagtcttcatattattggttaattacaaggacgtttacaatgcatatactggatagtcttcttgcctttagcgcctatttttttattggcgtggctatggtgattatttttctgtttatctattctaaaattacaccgcacaacgaatggcagttaatcaaaaacaataataccgcggcgagtctggcgttcagcggtacattgttgggttacgttatccccttatccagtgcggcaatcaatgcggtgagtattccagactatttcgcctggggcgggattgcactggtgattcagttactcgtttttgctggtgtcagactttatatgcccgcattaagcgaaaaaattattaatcacaataccgcagcaggaatgtttatgggaaccgccgcgctggctggcggtatttttaacgcagcttgtatgacatggtaatggacgatcatggccagaaaacgcaaaagtagaaataacagtaaaattggtcacggagcgattagtcgcattggtagaccgaataatccttttgaaccgtgccgcaatcgctacgcacaaaaatacttaacgttggcgctaatgggcggtgccgcttttttcgtattgaaaggttgtagcgatagtagcgatgtcgataacgacggcgacggaacgttttacgcgacagtgcaggattgtattgatgacggtaataatgccgacatttgcgcgcgtggctggaacaacgccaaaacggcattttatgccgatgttccgaagaatatgactcagcagaactgtcagtctaagtacgaaaattgctactacgacaatgttgaacagagttggatcccggtcgtttctggatttttgttaagccgggttattcgtaaagatcgcgatgagccgtttgtttataacagcggcggttcctcttttgctagccgcccagtctggcgcagcacttctggtgattactcctggcgctccggttctggcaaaaaagagtcttactctagcggcggctttaccaccaaaaaagcgtctaccgtttctcgcggcggctatggtcgttcttccagcgcccgtgggcattggggaggctaatcatgctgagacacaacgttcctgtgcgacgggatctggaccagatcgccgctgacaacggtttcgactttcatatcatcgacaatgaaatctattgggatgagagtcgggcttaccgttttactctgcgccagattgaagagcagatcgaaaaaccgactgcggaactgcatcagatgtgccttgaggtggtggatcgcgcggtaaaagatgaagagatcctgacgcaactggcgatcccgccgttgtactgggatgtgatcgctgaaagctggcgcgcccgcgatcctagcctgtatggacggatggattttgcctggtgtggcaatgcgccggtgaagctgctggagtacaacgccgatacgccaactagtttgtacgagagcgcttattcccagtggctgtggctggaggatgcccggcgcagcggcattattccgcgtgatgccgatcagtacaatgctattcaggaacgcctgattagtcgctttagcgagctttacagtcgggaaccgttttatttttgctgctgtcaggacaccgatgaagacaggagtaccgtgctgtacttgcaggactgcgcccagcaggcagggcaggagagccggtttatctacattgaagatctcggtttgggcgtcggcggcgtactgaccgatcttgatgataatgtcatccagcgtgcatttaagctgtatccgctggagtggatgatgcgtgacgataacggtccgctgctgcgcaagcgtcgcgagcaatgggtggagccgttatggaaaagtatcttgagtaataaagggctaatgccgctgctttggcgcttcttccctggtcatcctaatcttcttgcgtcctggttcgatggcgagaaaccgcagattgccgctggcgaaagctatgtgcgtaaaccaatctatagccgcgaaggcggcaacgtcaccatttttgacggcaagaataacgttgttgaccacgctgatggtgattacgccgatgaaccgatgatctaccaggcgtttcaacctctgccgcggtttggcgatagctacacactcatcggtagctggattgtcgatgatgaagcgtgcggaatggggatccgtgaagataacacactgatcaccaaagacaccagtcgtttcgttccgcattacattgctggataagaatgttttagcaatctctttctgtcatgaatccatggcagtgaccatactaatggtgactgccattgatggagggagacacagtgcactggcaaactcacaccgtttttaatcaacctataccattaaataacagcaacttatacctgtctgatggcgcgctctgcgaagcggtaacgcgtgaaggtgctggctgggatagcgattttctagccagtattggtcagcagttaggaacggctgaatcccttgaactggggcggctggcgaatgtgaatccgcctgaattattgcgctacgatgcgcaaggacgccgtctggacgatgtgcgttttcaccccgcctggcacctgctgatgcaggcgctatgtaccaatcgggtgcacaatcttgcctgggaagaagacgctcgctccggcgcatttgtggcgcgcgcggcgcgttttatgttacatgcgcaggttgaggcagggagcttatgtccgataaccatgacctttgccgccacgccattgttgttacagatgttacccgcgccgtttcaggactggaccacgccgctattgagcgatcgctacgattctcacttattgccaggtgggcaaaaacgcggtttgttgattggcatgggaatgacggaaaagcagggcggttccgatgttatgagcaacaccacccgtgcagagcgtctggaagatggctcttatcggctggtggggcataaatggtttttcagcgttccgcaaagcgatgcgcatctggtgctggcgcagaccgcgggtggtctgtcctgcttttttgtgccgcgctttttgcctgacgggcaacgcaacgcgattcgcctcgagcggctgaaagataagctgggtaatcgctctaacgccagttgcgaagtggagtttcaggatgccattggttggttgttggggctggaaggggaaggaattcgtctgatcctgaaaatgggtgggatgacgcgttttgattgcgccctgggtagccatgccatgatgcgccgtgcatttagcctggcgatttatcatgcacatcaacgccatgtttttggtaatccattgatccaacagccccttatgcgtcatgtcttaagtcgcatggcacttcagcttgaagggcaaacggcgttgctgtttcgtcttgcgcgagcgtgggaccggcgtgccgatgccaaagaagccctgtgggcgcgtttatttacgcctgcggcaaaatttgtgatctgcaaaagaggtatgccgtttgtggccgaagcgatggaggtgctgggcggcattggttattgcgaggagagtgagctgccgcggctttaccgggagatgccggtaaacagtatttgggaaggttccggcaatattatgtgcctggatgtgttgcgcgttctcaataagcaagcgggcgtatacgacttattgagcgaagcatttgtggaagtgaaagggcaggatcgctattttgatcgcgcggttcgtcgtttacagcagcagctgcgtaagccagctgaagaactggggcgagagattactcatcagctattcctgctgggctgcggtgcgcaaatgttgaaatatgcttctccgccaatggcgcaggcgtggtgtcaggtgatgttagatacgcgcggcggcgtacggttgagtgagcagatccagaatgatttattgctgcgggcgacggggggagtgtgtgtgtaagcgtatacgactgatgcgacgctggtttcgattaactaaatgaaatatgtgaaaattgtaggccggacaaggcgctcgcgccgcatccggcattgttcatttgctgtagatgacactcatgcatacagtatcgcctgtacgcgccagttatcaggctgctggtcttcgtacatggtaataatgcggtaccaactcgcaccttgttcatcggcctttaacgccacgatacgttccacgtcctgcggatccccactaatattgctaacactgatctgacctatttcattcaggcccgtcacgcagtcagcactggcgaattctgcagactgtgccgtggcgctcgcaggataagtcactaattgcaggctgggactggcaagtaattgtttcatcgtcagctccatttttcgtttccccacatgttgcagggcattccatcgcggtaataaacgcccaggcttccagccggtaatttattgtgcacaggtaaacgcatagggacgcaaagcaatgtaaagctgactatgtaagttgtctgatttatttacggtacaaaatggcttgactataccactgtcctgtcacgatggtttcgtccaccatgacgacaacgtaataatcagcttttgcagcgacagctttcgctttgatttctgctaatgcgtcatccggagaaccccgaaccatcgtgcttacgctacctattcgctgtaacccttgcgtctggtcgcggcgaatctcttgcggatggtccgttactggcggtgctggctgtggcgtaccttgcagtgcgctacaggcacttaacatcaacaccaataataaactggcaaaccggtaaataacgctattacgtttcctgctaaccatagtgtagtgccttattaatttaactttgggggaatgttcccgaattgttacctggtacgcgattttcgaatgaaaacgtgacgaaagcgtaacccacatctcaacattatgaactaataccgccagcagaaacttgtgctaaggatttcttcatgtcataccagacaaaaaggagagacagatgattgaaatagaaagtcgcgagctggcagatattcccgttcttcatgcttatcctgtcgggcaaaaagataccccgttaccgtgcgtaattttttatcacggctttactagttccagtctggtgtatagctattttgccgttgcgctggcgcaggctggtttgcgggtgatcatgccggatgcgcccgatcacggtagccgttttagtggtgacgcagcgcggcggttaaatcaattctggcaaatcttgctacaaagtatgcaggaattcactactttacgtgcggcaatagccgaagaaaactggctgcttgatgaccgtctggcagtcggtggcgcgagcatgggcgcgatgacggcactggggattaccgctcgccaccccacggtgagatgtaccgccagcatgatgggaagcggctattttacaagtctcgcccgtagtctgtttccaccgctgatacctgaaacggcagcacagcagaatgaattcaataacattgtcgcgccactggcagagtgggaagcgacaaaccacctggaacaacttagtgacagacctctactgctgtggcatggcctcgacgatgacgttgtgcctgccgacgaaagtctacgtttgcagcaggccttaagcgagacgggacgggataaactgctaacctgtagttggcagccaggcgtgcgtcaccgcattacgcctgaggcgttagatgctgccgtgacatttttccgccagcatctttaaacacgcagaatgctgaccccttgcgcttccagttgttgcaggatttccgggttagcatttttgccggtgataagcatatcgatttgatcggcacggctaaaaagcattcccgcgcgttcgccaatcttactgctatcaaccagtaccaccagtttccctaccacgctcagcatcttctgctctgccattgctgtcagcatatcggttttatacaacccttctgcggtcagcccttttccgctggtaaacatccagtgcccggcatagagactgttttcgctgccctgcgggcttaaagtgatggactgacttttgttgtactgtccgcccataatgatcacgctgtcatgttcttgatcgatcaggtaatttgccagcggtagataattagtgatgatttgcactggcttgccacacatttcccgcccaagcagaaacgcggtggagccgcagttgatgactacgctttcgcccggattaaccagctggctggccgctttagcgatacgtactttttcatcgtgattctgcgcctgatgcagattcatcggcgtccagcgcgggcgctgttgggtaatagcttctgcgccattgcgcacttttttcagtttgccgctttcgtcaagtttattgatatcgcgtcgcgcagtggcagggctaattcccagacgctcaacgactttctcaacggtcacaaagcccaattgtgcgagcatttccaggaggatttgatgtctttgtgcttcagtcatgagctattccgataaaatttgatttttttagatgatatttgaaatagccaggaaatactacgccggatagcgcgaacttctccacgctacccggtataaacgacagattacaggaaactcttgaacggcagatccggttcaatagtgaagcaatcatcgaaaccgcgcggatagtggtactcgaagttgtctttatccagcggccaggtaaatttgccacccacctgccagataaacggcttgaagccatacttcaggcgatcttttttcatctcccacagcacgcggatctcttgcggatcggcctggaagttactccagatatcgtggtggaacgggatcactactttcgcattcagcgcttcacccatacgcagcatatcggcgctggtcattttgtcggtgataccgcgcgggttttcgccgtagcttcctaacgccacgtcgatctgatgttcgttaccgtgcttcgcataatagttagagtagtgggagtcgccgctgtgatacagggagccgccaggcgttttgaacaggtagttcaccgcgcgatcgtccatgccatctggcagtacgccagccgctttttgatcggcaggcagggtgatcagtgcagtacggtcgaaagcatcaagcgcatgaatttcaatgtctttcacttttactacatcgcccggtttgaccacgatgcaacgctctttcggtacgccccagccaatccacaaatccacacaggttttcggtccgataaacggtacgtcatctgcacaattctgcatcacggcagcagcgacgttaacgtcgatatgatcgttgtgatcgtgagtcgccagtaccgcgtcgatctggcgaatcgcaaacggatcaagaacaaacggggtggtacgcaggtttggctgcagttttttcacgccagccatgcgctgcatctggtgaccctgtttcattaacgggttaccgtgactttgtttgccagtgccgcaccagaaatcaacgcaaacgttggtgccaccttcgcttttcaaccagatcccggtgcagccaagccaccacatcgcaaatgtgccaggagcgacctgttcttgttcaatttcttcattcaaccagctaccccactccgggaaagtgctcaggatccaggattcacgggtgatacttttcactttactcatcgccatttaccttcatgatagttcaattcgaatcaatatgtgattggttttgattaatcctgacactattttttcaggaaggcaatgaccattttttgactttttgccagggaagttgttgttgattttgagtatggaaagatttaatggaatgtgtaattcaattaactaaatgaatttaaatggataattgtttcgttgtgtgaatcccactctatccatgtggaattatttgcgggtcgcgtcacatttaatcataaataatcttgttgtgattacttttgaaaattagagtgagtgcacaacattccgggtgtgtggaatacccggttacctcttcttcaggagatcgttatggagatcctctacaacatctttaccgtgttttttaaccaggtcatgaccaatgccccgttgttgctgggtattgtgacctgtctgggctacatcctactgcgcaaaagtgtcagcgttattattaaaggcacgattaaaaccataattggtttcatgttgttgcaggcagggtccggcatcctcaccagcaccttcaaaccggtggtggcgaaaatgtccgaagtctacggcattaacggcgcaatttccgatacctacgctagtatgatggcaaccatcgaccgcatgggcgatgcctatagctgggtgggttacgccgtattgttagcgctggcgctgaacatctgttacgtgctgttgcgtcgcattaccggcattcgcacaatcatgttgaccggccacatcatgttccagcaggccgggttgattgccgttacgctgtttatcttcggctactccatgtggaccaccattatctgtaccgcgattctggttagcctctactggggcatcacttccaacatgatgtacaagccgactcaggaagtgacggatggctgtggtttctccatcggtcaccagcagcagtttgcaagttggattgcctataaagtcgcgccgttcctcggcaaaaaagaggagagcgttgaagacctcaaattgccgggctggctgaacattttccacgacaacatcgtctccacggcgattgtgatgaccatcttctttggtgccattctgctctccttcggtatcgacaccgtgcaggcgatggcaggcaaagtgcactggacggtgtacatcctgcaaactggtttctcctttgcggtggcgatcttcatcatcacgcagggtgtgcgcatgtttgtggcggaactctctgaagcatttaacggcatttcccagcgcctgatcccaggtgcggttctggcgattgactgtgcagctatctatagcttcgcgccgaacgccgtggtctggggctttatgtggggcaccatcggtcagctgattgcggttggcatcctggtcgcctgcggctccagcatcctgattattcctggctttatcccgatgttcttctctaacgccaccatcggcgtgttcgctaaccacttcggcggctggcgtgcggcgctgaagatttgtctggtgatggggatgatcgaaatctttggttgcgtctgggcggtgaaactcaccggtatgagtgcctggatgggcatggcggactggagcattctggcaccgccgatgatgcaaggcttcttctccatcggtatcgcctttatggccgtcatcattgtaattgcactggcttatatgttcttcgctggccgcgcgctgcgcgcagaagaagatgcagaaaaacaactggcagaacagtctgcttaataaggagttttgattatgaccgtacgtattctggttgtgtgtggcaacggacaaggcagttccatgatcatgaagatgaaagtggaccagtttttaacccaaagtaacattgaccatacggtaaacagctgcgcggttggcgagtacaaaagcgagttgagtggcgcggatatcatcatcgcttctacgcacattgcgggcgaaatcaccgtgaccggcaacaaatacgtggttggcgtgcgcaacatgctctctcctgccgactttggcccgaaactgctggaagtgatcaaagagcatttcccgcaggatgtgaagtaaggacgcgccatgaaattacgtgatagcctggcggaaaataaatccatccgcctgcaggctgaagcagagacatggcaggaagcggtgaaaatcggcgttgacctgctggtggcggcagatgtggtagagccgcgttactaccaggcgattctggatggcgttgaacagttcggtccttatttcgttatcgctccgggcctggcaatgccgcacgggcgtccggaagagggcgttaagaaaaccggtttctctctggtaacgctgaaaaagccgctggagttcaaccacgatgacaacgatccggtggatatcctcatcaccatggcggcggtcgatgccaatactcaccaggaagtgggcatcatgcagatcgtcaacctgtttgaagatgaagagaattttgaccgtttacgcgcctgccgtaccgagcaggaagtactggatctcattgaccgcaccaacgcggcagcttaagaaggaattgaacatgagtttaccgatgttgcaagtcgcgctggacaaccagactatggatagcgcctacgaaaccactcgcctgattgccgaagaagtcgacattatcgaagtgggcaccattctgtgcgtgggcgaaggcgtgcgtgcggttcgtgacctgaaagcgctctacccgcacaaaatcgtactggcagacgccaaaattgccgatgcaggcaaaatccttagccgtatgtgcttcgaagccaacgctgactgggtgacggtaatttgctgtgcggatatcaacaccgccaaaggcgcgctggacgtggcaaaagagtttaacggcgacgtgcagatcgaactgaccggttactggacctgggaacaggcgcaacagtggcgcgatgcaggcattgggcaggtggtttatcaccgcagccgtgacgcgcaggccgcaggcgtggcgtggggcgaagcggacatcaccgcgatcaaacgtctttccgatatgggcttcaaagtcaccgtcaccggaggcctggcgctggaagatctgccgctgttcaagggtattccgattcacgtctttatcgcgggccgtagtatccgtgatgccgcttctccggtggaagccgcacgtcagttcaaacgttccatcgctgaactgtggggctaaggagcggatatgttgtccaaacaaatcccgcttggcatctatgaaaaagcgctccccgccggggagtgctggctggaacgcctgcaactggcaaaaacgttaggcttcgattttgtcgaaatgagcgtagatgaaactgacgatcgcctgagccgcctcaactggagccgcgagcagcgtctggcgctggtcaatgcgattgttgaaaccggcgtgcgcgtgccgtccatgtgcctttctgctcatcgtcgtttcccgctgggcagtgaagatgacgcggtgcgggcgcaggggctggagattatgcgtaaagctatccagttcgcccaggatgtcggtattcgcgtgatccagctggcgggctatgacgtttactatcaggaagccaataacgaaacgcgtcgtcgtttccgtgacggcctgaaagagagcgttgagatggcaagccgcgcgcaggtgacgctggcgatggagatcatggattatccgttgatgagctccatcagcaaggcgctgggatacgcgcactatctcaacaatccgtggttccagctctacccggatatcggcaacctgagcgcgtgggacaacgatgtgcagatggagttgcaggccggaatcgggcatatcgtcgcggtacatgtgaaagacaccaaacctggcgtcttcaaaaacgtgccgtttggcgaaggtgtagtggatttcgagcgttgtttcgaaacgctcaaacagagtggctattgcgggccgtacctgattgagatgtggagcgaaacggcggaagacccggcggcagaagtggcgaaagcgcgtgattgggtgaaagcgcgcatggcgaaagcgggcatggtggaggcggcataatgcaaaagctaaaacagcaggtatttgaagccaacatggagctgccgcgctacgggctggtgacctttacctggggcaacgtcagcgctatcgaccgcgaacgcgggctggtggtgatcaagcccagcggcgttgcctacgaaaccatgaaagcggccgatatggtggtggttgatatgagcggcaaggtggtggaaggggagtatcgcccatcttccgacactgcgacgcatctcgaactctaccgtcgttacccgagccttggtggcattgtccatacccactccactcatgccaccgcatgggcgcaggcggggctggcgatcccggcgttaggcaccacgcacgccgactacttctttggcgacattccgtgtacgcgcgggttaagcgaagaagaggtgcagggcgagtatgaactgaacaccggcaaagtgattatcgaaacgctgggcaacgccgagccgctgcatacgccgggaattgtggtgtatcagcacgggccgttcgcctgggggaaagatgctcacgatgcggtgcataacgcggtggtgatggaagaagtggcgaaaatggcgtggattgcccgcggcattaacccacaactcaatcacatcgacagcttcctgatgaataaacacttcatgcgtaaacacggtcctaacgcttattacgggcagaagtaaaacacgcgctgcggaaatttccttcctcgggagataactggtctaattccgcagccgtttttcaaaaaaaagccccctgcgaagggggcaaagcaaactatggcaatgtttcgttggttatacctggtgttagcgataaatatccgcgctggcgtgcatattgccgttactccccggttcccgcatcagaattacgtggtagtacgttgcgccttgcgcatctgtttcttcatttaatgcctgacgtgcttcgctttcagtggcgaaattatgattgatataaatcacgcctaagctttgcacatcgtccatatttctggcctggtggttattaatttcaatggctgcccatgtatttgcacttagcaaaagcacagccagaagggctaaaacacgactgaacatagatacctcctcgacggctgactttgtgtgctctcctctgtgatgatcttctgatttaattttaatcaatgataaagaagttgatggtgaccatttctgatgcagttgttcaaaaaaacaccatgatgaagtgtgatgaacttcaaatcagcgtgttagaggttaattgcgaaaggggagatttatttcggctctgcccttgagtttagcgaggcatacaagtactataacgcgtcatttttcagccgacctttaacacgttccttgcctccccgggattcggctgacccagacaggaggctgaataatccgtaaggagcaattcgatgcgtcattacgaaatcgtttttatggtccatcctgaccagagcgaacaggttccgggcatgatcgagcgctacactgctgccatcactggtgcagaaggcaagatccaccgtctggaagactggggccgccgtcagctggcttacccgatcaacaaactgcacaaagcacactacgttctgatgaatgttgaagctccgcaggaagtgatcgatgagctggaaactaccttccgcttcaacgatgccgttatccgcagcatggttatgcgtaccaagcacgctgttaccgaagcatctccgatggttaaagcgaaagacgagcgccgtgagcgtcgcgatgatttcgcaaacgaaaccgctgatgatgctgaagctggggattctgaagagtaatttctgatgaccaaccgtctggtgttgtccggcaccgtgtgcagggctccccttcgaaaggtcagtccaagtggaattcctcactgccagttcgtgcttgagcatcgttctgtgcaggaggaagccggctttcaccggcaggcgtggtgtcaaatgcccgttattgttagcggacacgaaaaccaggccattactcacagtataacggtcggcagtcgcataaccgttcaggggttcattagttgccacaaggcaaagaacggactgagcaaaatggttttgcatgccgagcagattgaattgatagattctggagactaaccatatggcacgttatttccgtcgtcgcaagttctgccgtttcaccgcggaaggcgttcaagagatcgactataaagatatcgctacgctgaaaaactacatcaccgaaagcggtaagattgtcccaagccgtatcaccggtacccgtgcaaaataccagcgtcagctggctcgcgctatcaaacgcgctcgctacctgtccctgctgccgtacactgatcgccatcagtaatcggtcacggtccattaatacgactttgagaggataaggtaatgcaagttattctgcttgataaagtagcaaacctgggtagcctgggtgatcaggtaaacgttaaagcgggctatgctcgtaacttcctggtaccgcagggtaaagctgttccagctaccaagaaaaacattgaattcttcgaagctcgtcgcgctgaactggaagctaaactggctgaagttctggcagctgctaatgctcgcgctgagaaaatcaatgcactggaaactgttaccatcgcgtctaaagctggcgacgaaggtaaactgttcggttccatcggtactcgcgacatcgctgacgctgtaactgcagctggcgttgaagtggctaagagcgaagttcatctgccgaacggcgttctgcgtaccactggcgaacacgaagtgagcttccaggttcacagcgaagtattcgcgaaagtgatcgtaaacgtagtagctgaataattcgttattcaacgagacgtaaaaacgccgaccattggtcggcgttttgctttctatttttcgtcaggtattagtttcgcaagtagatccattcaccattctcttgtgtccataagtcaggatggtttgctggcgttagatacatacgagcgcaactgatgtctcgctcctgcggcactcgctcgaaacccaaaccgctgtagattgcggcactactacttaaggaacgcagaccaattttcaaatcatggggtaaatcagaatacgcgtttagcaatgcagcaatgatgaatccgagggcattagaaacgcctgtaacagtgcgaagttggtcgatataaagatcgattgttggtagttcagaactccagcaattaggcatttgggcaggaagggttacaacgtatcctatcgtttggccggtatagtctggagtaccataaccaggtcccaaaaccacttcgtgtattgtgtatttactgttgggttcgaaggattcgacatcttgcaataaatatttcagttctgcggttaacctcgcacccgcgtaagctttattgtatttctgggcgtgaatattatctaatgtagcttcatggttccatccaaaagaattatcaccattcattgtgattccatcgtaagcattacacctcgtcgctaacttattgaatgcttgccagtcactgagatctagtttgtggatctcaacagtacgtctgccatcgcaattatgatctcttccacgattactaagtaatgtagcgcgtgcgtattgatgaaattttaattttactggtttgtcggtggagctaaaacgagataaatatgcaggaaaactataaatagtcgttggtaatgtcattgtaatgttacctgtttaatgtttttataaatatcgcagctgaatgttcacagaaaaaaatcgatattaataaaaataagtttgttttctgaagtggtgaaaatagcggatggtgaaagatattaatatcaaaaatcgctcattatggatataacgatgcacccggggagaaaatgacttccacgccttacaccgtacattcttgttgtgcggtatgtaattattctacgctgtcggtatcggtgtattcgttaatcagcaggttagccagccacaaaaagccattgagaaaattattgattttacatgggattattatattgctaatccttggtttttaaaaattgtgcatagtgaaaatcaaagtaaaggtgtgcattatgcaaaaagtcagcgtctcttagaaattaaccatgcgcacttgcagttaatggaatccttattggatgaagggaagaaacacaatatttttaagccagatatcgacccattgcaggtgaatattaatattgctgcgcttggcggatattatttgatcaaccagcatacgcttggcctggtttatcacatcagtatggttagtccccaggcactggaagccagacgtaaggtcatcaaagagacaatccttagctggcttttggttgaccctagttctaccgcgcacgaataattaccgcgcacgaataaaactgccatccggctggcgggtgaacaggacctgttgattattccccgtatcaatggttaagcccgtcaccacgccgctggcgttctggcggattttcaccatctgcccgttttgcaaattactcagcggcttacccgcgccttctacctgcgccattgcatagacatcggtagcgggcagtccgtggtcgcggaacagctgcgccatcgttttaccgggttcgacacggtaagagcgccattgattatcaattccgctatctggctggaatggttgcgtttgggtagtttgcggctgctcttctggctggccttcctgtataggttctggagcgaccggagccacctgatcaggaccattttgtggggtaactaattgcgcccgcagctgttcttctgtcggcggttgactttggctctgaatatctaactgcgcttcacgcgtcaccaccggcgcgttgggcgtatcatcagatggaagcagaaatccgaccaccaatacaatggcggcaataatgatcccccgacgatgcatcggcggcagcgggtccatgaagcgaaaattgtccggcgcgtgccagactttctccagggttggttttagttcaaagcgcccgggcatggtttcctcctgctccgcgtcttgttcctcaatcatagcctatgaataagctaacgctatgatgtccgtggtaaacccgcctttattatattcatacgggatattgctattgtttctttttccctgggatttgtcatcattcccgcgacaaagttttacccaaagaagtgtggctgatatgctgcccgctactttataccctaagaaaggaaatacgatgaccaccccaacttttgacaccatcgaagcgcaagcaagctacggcattggtttgcaggtagggcaacaactgagtgaatctggcctggaagggctgctgccagaagcactggttgcaggtattgccgatgcgctggaaggcaaacatccggctgttccggttgatgtggtgcatcgcgcgctgcgtgaaatccacgagcgcgccgatgccgttcgtcgtcagcgtttccaggcgatggctgctgaaggtgtgaaatacctggaagaaaacgccaaaaaaagaaggtgtgaatagcaccgaatctggcctgcaattccgcgtgatcaaccagggtgaaggcgcaattccggcacgtaccgaccgcgttcgtgttcattacaccggtaaactgatcgacggcaccgtgtttgacagctccgttgctcgtggtgaacccgctgaattcccggttaatggcgtgatccctggctggattgaagcactgactctgatgccggtaggttctaaatgggaactgactatcccgcaggaactggcatatggcgagcgcggcgcaggcgcatccatccctccgttcagcaccctggtgtttgaagtcgaactgctggaaatcctctaagcagcgcattctgttcccctcgaacgagaggggagcaggcattcagcaataaacccttcagtttgccaaacggcgctattttgtgttgcaaagaccccgtaagcgtgtatttttgtgagctgtttcgcgttatcaccgtgatatgacactcactttaaacataaaattaacattagatctaaatcttagtattcatcccgcgtattgttacctaatatcgatgagtcccgatacagattcgtcgtatcatagactgactaaaggccgtagagcctgaacaacacagacaggtacaggaagaaaaaaacatggtagatcaggtaaaagtcgttgccgatgatcaggctccggctgaacagagcctacggcgcaatctcacaaaccgacatattcagcttattgccattggcggtgccattggtacggggttgtttatggggtctggcaaaacgattagccttgccgggccgagcatcattttcgtttatatgatcattggttttatgctctttttcgtgatgcgggcaatgggggaattgctgcttagcaatctggaatacaaatcttttagtgacttcgcttccgatttactcgggccgtgggcaggatatttcaccggctggacttactggttctgctgggttgtaaccggtatggcagacgtggtggcgatcacggcttatgctcagttctggttccccgatctctccgactgggtcgccagcctggcggtgatagtgctgctgctgacgctcaatctcgccaccgtgaaaatgttcggtgagatggagttctggtttgcgatgatcaaaatcgtcgccattgtgagcctgattgtcgtcggcctggtcatggtggcgatgcactttcagagtccgactggtgtggaagcgagtttcgcgcatttgtggaatgacggcggctggttcccgaaaggtttaagtggcttctttgccggattccagatagcggttttcgctttcgtggggattgagctggtaggtacaacagctgcggaaaccaaagatccagagaaaagtctgccacgcgcgattaactccattccgatccgtatcattatgttctacgtcttcgcgctgattgtgattatgtccgtgacgccgtggagtagcgtagtcccggagaaaagcccgtttgttgaactgttcgtgttggtagggctgcctgctgccgcaagcgtgatcaactttgtggtgctgacctctgcggcgtcttccgctaacagcggcgtcttctctaccagccgtatgctgtttggtctggcgcaggaaggtgtggcaccgaaagcgttcgctaaactttctaagcgcgcagtacccgcgaaagggctgacgttcagctgtatctgtctgctcggcggcgtggtgatgttgtatgtgaatcctagtgtgattggcgcgttcacgatgattacaaccgtttccgcgattctgtttatgttcgtctggacgattatcctttgcagctaccttgtgtatcgcaaacagcgtcctcatctacatgagaagagcatctacaagatgccgctcggcaagctgatgtgctgggtatgtatggcgttctttgtgttcgtggtcgtgttgctgacactggaagatgacactcgccaggcgctgctggttaccccgctgtggtttatcgcgctggggttgggctggctgtttattggtaagaagcgggctgctgaactgcggaaataaccgcattatcatgctggatggcgcaatgccatccagcttttagatcactcacccgccagcgcgcgtgggaacagtacattgttttccagactgatgtgatccatcaggtcatcaatcagttcattaatgccgttatacatcgctttccaggtggtgcaggcttctggcggcggtgtgacgttattggtggtgtgtttaatcacttccagcagttcgcccgcttcatcgtgctcgctttccattacgctgattggccccattgcctggctgcccatgccttgtttgatcatcgggaagaggatctgctcttctttcatcatgtggctggaaagctcttcatgcagcatggtcaggtattttgtcagcccttttggcacgctcggtttgtcggcgtgaacgcgctcgactttagtcgcttgcagaatcagctccggcagttgctcgcggtgacgatcgtggtagcgcacgatgatatggtcgatgatttctgccagcggggcgctacgccagtctttctcaatcggttgttcagcgagctttgccagttcagcttcaatgacctcaacatccagttctttacgtgccgccgcgcgcgccagcgtctgcttaccgccacagcagtaatccatatcatatttacgaaacagagcactagcgcgaggaatagagagcgccagttcacctaaaggttggtcgcgataagccatagctgatacctcattcttaataagataagatgtattttaaatgcatctttaaggcaaaagctataacccttacgtagcagaggcttatttaactcactgccagcgtgtcaactttcactgacagattcagttaaaggtttttctggttttgctctgaccgcgatgaccacgccaatcactaacagcgcgataccgctcagcgtcattagcggcggcatttgctggcggagtaaaaaggtgtacagcaaacctgccagcgtttcgaaaacaatcagcggcccgagaatcactgtcggtaatagctggctggcgacgttccagcagagtgcgccaacccaactgcaaagcacggctatcgcaaccatcagactaataaacaccagcggacgggggccaaagggtagggagaagtccggcgtttgcgtattcagccagtaacaagcgacgagatagccgataagactaaccggcagtgtgaccagcgcctgcgctgttgcccacatcatcggatgtttgtcgggattttcccgcagccagcgggcgttgcgcagggcataccacgcccagcagaccacggaaactaacgccagcacgatgccagaggtataacgtgcccagtcaaaatcggggagtccgtggtttaactcagcaatattcacacacgccaggccgatgccaatacaaatcagtgctggggcgagttttccccacgcgagtttgccgtcgcgctggctataaagcagattggcaaagacaggaatgaccaccggcagggtgccgataatcatcgtggaaacaggcgcgccagtacgttgaatggcactggcaaggcagaagtaatagatgaggttgcccatcatagtgagcatcaaggcggtaagccagtcgcgacgcgccaactgacgcagacgcacgcgtcccagccaggcaatgggcagcgcaattaaccctaacgccagataacgccccatgctctgcaacatcgccgggtattccggcacgatcaacggcccgacaaaaataagcccccacatcaaccctgctaacagggcgtacagcacgccgctaatcattactggcatccattgatctgtcagaagaaagttcaggaagcagacatgattgctcccggcatcccgtcattatcagagaggatgcgggaggatgccactttaattaattagttattaacattaaaaagatggcttacgctttcggctaacgttgtcgttgggtggccaatcaatttgctaagtgttttgctgtcatcaaacagaccgcctttgcttgcgccaacgtcagaatccgccagcatatccgccagtccgtcgggcagtccgacgcttttcagtgccgcggcgaaatcggcttcgctcagattttgataggtaacctgtttgccgctctgtttggtcagctctgccgctaactgtgtcaacgtccaggcactatcgcccgccagttcgtaaaccttgccttcgtgaccggcttcgctaatcacgcgtgccgcagctgccgcataatctgcccgcgttgcactggcgattttgccatcgcccgccgcaccgataaatacgccgtgttccagtgctgccggggcgctggcgaggtagttttcgctgtaccagccgttgcgcagcagggtgtaaacgatgccagaatcagccagcattttctccgtctcgatgtgctcatcggcgaggccgagcggggaggtatctgcatgtagcaggctggtataagcgataaatttcacgccagccgcctttgcggcattaataacattacgatgctgcggggcacgttgacccacttcgctggaagagatcagcagtagtttttccactccctgaagtgcagatgtcagtgcggcttcatcgccgtagtcagcctgacgcacggtaatgccttgtgctgccagggcttgggcttttgccggattacgaacgatagccactatttggctggcaggaaccgttttcatcaaggattcaataacatagtgaccaagttggccagtggcaccagtaatagcgatcatgggaagtctccatcgttttgtcttgtgtttaaatacgctaacacctaaacttacttttagtaagtacgtacaaaaaggtaagtatgaaatgagtcaggttagcctgagccaacaactgaaagagggtaatctctttgcggaacagtgcccgagccgcgaggtgttgaaacacgtcaccagccgttggggggtgttgattctggtggcgctacgcgaaggtactcatcgctttagcgacctgcggcgcaaaatcggtggggtgagtgaaaagatgcttgcgcagagcttacaggcgttagaacaggatggttttcttaaccgtatcgcgtatccggtggtgccgccgcatgtggaatatagcctcacgccgctgggcgagcaggtgagcgaaaaggttgctgcactggcggactggattgagttgaatttgcccgaggtgttggcggtgcgggatgaacgtgcggcataactgccggatgcgctgagcttatctggtctacggtgcatggcttgtagggcggataagatgcgccagcatcgcatccgccaataaatgccggatgcggttgatgatttataggccgaaaaagaagtgttttacttactcaaatccacctgataaatcgcaaacccgatatcatcggtcgcgactttattcatcggatactgccctttctctttaataaacgctgcggctttatcactcggagaggtttcgaaacggatatccagtttcttatcgccagctatcggtgctaaacgccagttgttatctgccgccgggtgaatttcccccgcacgtttgctctcatcagcaatccacgctgccagcacgctgcggttctcatccggactagcaaaagcgatatggctgtcgcccgtaccggcaaatttgccgccgtaagcgcgatagttattggtggcaaccaggaacatggcgttcggatcaatcggcttgccattaaaggtcaggttcttaatcctttccgcattggcattaatcatctggcactcgccgtcataacgggcgggctgggtaacatcaatctgataattcacaccatcaataacatcaaagttataagtgcggaaaccatcccagttgatgagactctgtggtttcgtgctgttgggatcaatctggttaaactgtcccgcggagcactccagccactctttcacctctttaccgctggctttcaccacaatcagcgtattgggatagagataaagatcggcggcattacggaaggtcaactggcctttttccacctccacatagcttgccgggtcatttttgcgaccaccgactttaaacggtgcggcagcactaagcaccggcagttttgccagatccggatcgccctgaatgtaatgctcgacatacgctttttgcgcgttgttcaccacctgcacggtcggatcgtcctgcaccagcgccagatagctatacatattgtcggcagatttaccgattggcttgctgacgaactggcgtgtggcatcgtgatcggctttgagtgtttctaccagcttgctgtcttccgccgcgagggattttttattagcgatgtcgtaaatcggtcgtgcttccgctttcgcctgcgtcacctgccatttaccgctgtcattactgagttgtaagtcgaccacaccaagatgatcgccccacatgcctggcattaccgccggaacaccattcagcgtgcctttggcgatatcagccccttcgatatcagcaaaatctttacctgggaaaacggcgtgagcatggccaaacataatggcgttaacgcccggaatttcactgaggtaataaacactgttttccgccatcactttatacggatcggcagatagcccggaatgtgccagaacgacaacaacatcggcacctttctcgcgcatttcaggcacgtatttgcgcacggtttcggtaatatcattcaccgtcactttcccggataaattagctttatcccagcccatgatttgtggtggcacgacgccaatatagccaatcttcagcgtctgtttttttccgtctttatcgaccacttcggtgtctttaattaaatacggtgtaaacattggctgtttggttctggcgtcaatgacgttggcatttacataagggaatttcgctcctgccagcgcatttttcaggtaatccagaccgtagttaaactcgtggttgccaagcgttccgacggtatagtccagcgtatttaatgccttatagaccgggtgaatatcacctgcttttaatcctttcgcgctcatgtaatcggccagcggactcccctgaatcaaatcgccgttatcaaccagtacgctgtttttcacttcattgcgggcatcgttaatcaggcttgccgtacgtaccagtccgaatttttccgtggcggtgtctttgtaataatcgaaatccatcatgttgctatgcagatcagtggtttccatgatacgcagatcgaccgtcgctgcattcacactggcggcaatcagcgtggccaggagcgttgcgctaaacttaatcatcagggacatccttttatcatcgggaatacgaaagaaaagggagaataaacgtcttacttatagaacagtgaagaatgccacaattttacgctttgaaaatgatgacactatcacagttggcgcattcattaacgatagggtataagtaaaacaataagttaacaccgctcacagagacgaggtggagaaatgttagatcaagtatgccagcttgcacggaatgcaggcgatgccattatgcaggtctacgacgggacgaaaccgatggacgtcgtcagcaaagcggacaattctccggtaacggcagcggatattgccgctcacaccgttatcatggacggtttacgtacgctgacaccggatgttccggtcctttctgaagaagatcctcccggttgggaagtccgtcagcactggcagcgttactggctggtagactcgctggatggtactaaagagtttattaaacgtaatggcgaattcaccgttaacattgcgctcattgaccatggcaaaccgattttaggcgtggtgtatgcgccggtaatgaacgtaatgtacagcgcggcagaaggcaaagcgtggaaagaagagtgcggtgtgcgcaagcagattcaggtccgcgatgcgcgcccgccgctggtggtgatcagccgttcccatgcggatgcggagctgaaagagtatctgcaacagcttggcgaacatcagaccacgtccatcggctctagcctgaaattctgcctggtggcggaaggacaggcgcagctgtacccgcgcttcggaccaacgaatatttgggacaccgccgctggacatgctgtagctgcagctgccggagcgcacgttcacgactggcagggtaaaccgctggattacactccgcgtgagagcttcctgaatccggggttcagagtgtctatttactaaattcagatggcagaaacagtgtatttcctgattctgccatcctgatttctcccaacctaaaaagttataaataaaaagagattgtatttaaagtgcaaaaattcaattgctaataagttacattttaataatgagcgttttttgatagtttacttctatagtgagatatttaatggcgacataaagtaaccaaataaaataaggttgtcatatgttacccaggatcagacacaataattttattggtgcggtggagttatttgtaaagtctagctatacaaaaacacatagtaacaatttttttaacaacatccatcatgcatttaagaaaaaagattggattagcaattatgatagcctgttaactttgagggagttctttcgttgcgcaactcagattgataaaagtggttatcaggtgcttagtagtaaaaatgaaactgttcacgccatggataagtttcttatcagtttcagccttaaagataacggtgccgaatatacaatgacattgcgaggtagtggatttgaatacgaagaaatacccataacaataaatgaatataacagtttcatggatttcaaaaaccgtgaatttccgttagaacaaaacagacgattgtatgcccgggatattctacagaaaaaacagtctgacataccgaaaaggattaaaggttatattcaccaggcgattggtgacgtgtctttaggttatgccttattggaggatatagtaagcaaattaaaacggggtaaatttgaactccaaataccaggaggtggaattaaagaatgcgatggatggtatatttacgaaaaaataattgatgataattttgccatagtcatagaatctttgggctttgcgcttaaaatctatggaggggatgaacgttttcgtaatggttcctctgttgttttggaggatgaagattactctcttatttataattttctggttaatgcaggttgccaacaagtcgaattagccgaacaagtggatgcgatagtaagtgcgaatctggccgcagatagcgatattaccaaagaaaagatttgcgagaaatataaaagcaccattgaggcgtttaaaaaagagcaactagcgttaccagtattagttcggcgtaagaacagtgagacttaattcccctatcccatagataacgataggggaaaattatttttgcagaatttatgttattgccattatttgagcaacttttgcagcaggtccatcacttgctgcacctcttccggtgtgagcgccccgtctttggcccattgcacgcgaccatccttatccagcaccactacagcggaactttcttcatccagctgccaggcaccgagcgcgacgccattgctatcgacaataaactggctccagggataaagctttttattactctccagactgctgcgcacaaacatcccactacccggaatcgcgtcgtcggtgttaacaatggtggtggtctggtaacgatcgtgcggtaacttcgcacttttaatcgcttcaatcagcgtcgcgtttttctcttttgcagaggtgcgaccagcaatatgttgcagtactcgcacttttcccactaactgcgcgctgttccaggttttgtagctaaactgatctttatcaagcaccaactcgccccgatcggtaatgccaatcggcggcactcgctgaccggtttcgaactgatgtgcggaagccatcatcggcaacagcaggcaggtgagtgccagaatcttgcgtagggtcatggtgtttccttcttatgatatgcaggtgatccgaccacttgggtctgagttttaatcatatgtgctatttatcgaatttcccgcaagtgtgatgccagtttgcggtcaagcgcacaaatcatatgaaaaatgaatgcttatactgaagaccgcgcttcggtaaaaagataattctgaataattgtaacctttaggtaaaaaaagttatacgcggtggaaacattgcccggatagtctatagtcactaagcattaaaatttgcgcctcataatagttgggccgattgtggcaccgcacaggcgtaatactcagcaggagataacaatgaaaattttccaacggtacaacccacttcaggtggcgaagtacgtaaagatcctgttccgtggacggttatacatcaaggacgttggcgcttttgaattcgataagggtaagattcttatcccaaaagtgaaggataagctgcatttgagtgtgatgtccgaagttaaccgtcaggttatgcgtctgcaaacagagatggcttaaccaaagtgctatgcagtaaaaagtgctatgcagtaataagacggctcctgattcaggagccgttgatgtttctgggggttacgcgacgctttcttctttatctttagcgtcaggcagttttgggctaagggcggtggccttgctgtcgatccgggtcaccagcagctggtcgatgcggtagttatcgatatccaccacttcaaatttgtagccggcgaatttcacgctatcggtgcgtttcgggatcttacgcagcataaacatcataaagccgccgatggtttcgtagttgccgctctgcgggaactcgtcaatatccagcacgcgcatgacgtcgtcaattggggtgccgccgtcaatcagccaactgttctcatcacgggcgacaatctgctcttccagcccctgaccgaccagatcgcccatcagcgtggtcatcacgtcattgagggtgatgatccccaccaccagcgcgtactcgttcatgatcaccgcgaagtcttcacctgcggttttaaaactttccaacgcctcactaagggttaacgtatccggcacaatcagcgtgttgcgaatttgtacgccgctgttcagtgccaggctttggttagccagcacgcggttcagcaggtctttagaatcgacataaccgatgatgtggtcaatatcttcattacagacgaggaacttagagtgcggatgttccgccaccttattcttcaggctttgctcatcttcgtggagatcaaaccaaatcacgttttcacgcggtgtcatactagacggaacggtacgggattccagctcaaagacgttttcaatcagctcgtgttcctgtttacgtaacacgcccgccagcgcaccggcttccactaccgcgtagatgtcatcagaagtgatgtcatctttacgtaccattggcagtttgaaaatacggaagattatgttcgccaggccgttgaagaaccacaccagcggggtgcaaacgtacaggcagaagcgcatcgggttgatgatacgcaaagccacagcttctggcgcaatcataccgatgcgtttcggggttaaatccgcaaacaggataaacatgccagtcactaagctgaaagagagaataaagctcagttgctcagagagctctgcgctcatatagcgggagaacaggctgtgaaaagctggagaaaatgccgcatcaccgacgataccgccgagaatcgccactgcgttcagaccgatttggaccacggtaaagaacatgccgggattttcctgcatattcagaacgcgttgggcatttatattgccttcatcagccagcagtttaagtttgattttgcgactggcggcaaggctgatctcggacatgctgaagaacgcacttacagcgatcaagcagagtatgactaaaatactgtttaacatatcttatccgacctttcaggccagatcctcggaaggggaagttgattaatttgtgtgaaatacacattgaaagccgattcgaagaaagtgaaccggcattttcagtggctagtatagcgtaaggtactgtaaagccgccagagggttaaaattcagacagctgaaaaatgcaaaactgcctgatacgctatgccgatcaggcctacgcagtccttgcaatatattgaatttggacgattttgtaggcctggtaagtcgtttacgccgcatcaggcatagacaaagagcactttatcaacaaactacatttgtacccgtaacgttatgcttccggcggcagacagacgccaattccgccaattccacagtaaccatacgggtttttatgcagatattgctggtggtcatcttcggcataataaaacggtgtggcgttagcgatttccgtggtgatgtgacgatcgtcatcggcggcaagcatcgccgcctgaaaacgttccagactggcgcgagctgcggcatcctgttctggggtcagcggataaatcgcactacgatactgcgtgccgtggtcattgccctgacgcattccctgggcgggatcgtgattctcccaaaatacctgtagcaactgctcatagctgatgacggaaggatcgtaaacaatgcgtaccgcttcggcatgacccgtatcaccggagcacacttcccgataagtcggatttggcgtatagccgccggtatagcctgcggcggtgctgtaaacgccgggtaactgccagaacagacgctccacaccccagaaacaacccatcgcaaaaatggcaatctccattccgtcaggtacattggtcatactgtgaccgttgaccgcatgcagcgtggctacgggcatcggggtgttacgtccaggcagggcatcggcgggggaaaccagatgctttttatcaaataaactcatggtgtcgctctcccgaaaatcggtcattggggttaaggttgtaacaagaggcgtatttgcacacaataaccaccgtgaataggtctaaagtaaaacataagaaatatttggggtttagtctgctttttaatccatattactggatttttgttaagccgtttaacggcgttccaggggcaggaaaaaaggatattcaggagaaaatgtgcgctatatccgacagttatgctgtgtaagcttactctgcttaagcggatctgccgtcgccgcgaacgtccgtctacaggtcgaggggttaagcggacagctggaaaagaacgttcgtgcgcagctttctacgattgaaagtgatgaagtgacgccagaccgtcgctttcgcgcacgcgtcgatgatgccatccgcgaaggtctgaaagcgctgggttattaccagccgaccattgaatttgatctccgtccaccgccaaagaaagggcggcaggtattgatcgccaaagtcacgccaggcgtgccggtgttaattggcggcaccgatgtggtattgcgcggcggcgcgcggaccgataaagactatttgaaattgctcgatactcgcccggctattggcacggtactgaaccagggcgattatgaaaatttcaaaaagtccttaaccagcattgcgttgcgtaaaggttatttcgatagcgaatttaccaaagcgcagctgggcattgcgctcggcctgcataaagccttctgggatattgattataacagtggcgaacgttaccgctttgggcatgtgacctttgaaggaagtcaaatccgcgatgaatacctgcaaaatctggtgccgtttaaagagggcgatgagtacgaaagcaaagatctggcagaactgaaccgccgactttctgctaccggctggtttaacagcgtggtggtggctccacaatttgataaagcgcgcgaaacgaaagtattaccattgacgggcgtggttagcccgcgaacagaaaacaccatcgaaaccggggtcggttactctacggacgtgggaccgcgcgtgaaagcgacgtggaaaaagccgtggatgaactcttatggtcacagtctgaccaccagtactagtatttccgcgccggaacagaccctcgacttcagctataaaatgccgctgctgaagaatccactggaacaatattatttggtgcagggcggttttaagcgcactgacctgaacgataccgaatctgactccactacgctggtggcttctcgctactgggatctctccagcggctggcagcgtgccattaacctgcgctggagtctcgaccactttactcagggtgaaattaccaataccacgatgctgttttatcctggggtgatgattagccgcacgcgttctcgtggtggcctgatgccaacctggggcgacagccaacgctactctatcgactactccaacacggcctggggtagtgatgtcgatttctccgttttccaggcgcagaacgtctggatccgcacactgtacgatcgccatcgttttgttacacgcggcacgctgggctggattgaaaccggtgatttcgacaaagtaccgccggatctgcgtttcttcgccgggggcgaccgcagtattcgtggctacaaatacaaatctatcgctccgaaatacgccaacggtgacctgaaaggggccagcaagttgataaccggaagcctggaataccagtacaacgtgaccggaaaatggtggggcgcggtgtttgtcgatagtggcgaagcggtaagcgatattcgccgcagcgactttaaaaccggtaccggggtcggcgtgcgctgggaaagcccggtcgggccaatcaaactcgattttgccgtaccggtcgcggataaagacgaacacgggttacagttttacatcggtctggggccagaattatgagtttatggaaaaaaatcagcctcggcgtggttatcgttatcttactgttgctgggaagcgtggcgtttctggtgggcaccaccagcggcctgcatctggtatttaaagcggcggatcgctgggtgccaggactggatattggcaaggtcaccggcggctggcgcgatctcaccttgtctgacgttcgttatgagcagccaggcgtggcggtaaaagcgggcaatctgcatctggctgtcgggcttgagtgcctgtggaacagcagtgtttgtattaatgatctggcgctgaaagacattcaggtcaacatcgacagtaaaaaaatgcctccttctgaacaggttgaagaagaggaagatagcggtccgctggatctctccacgccgtatcccatcaccctgacacgggtggcactggacaacgtcaacattaagattgatgacaccacggtaagcgtgatggacttcacctccggcctgaactggcaggagaaaaccctgaccctgaaaccgacgagcctgaaaggcctgctgattgctctgccgaaagtggcggaagtggcgcaggaagaagtggtcgaaccgaaaattgaaaatccgcagccggatgaaaagccgctcggcgaaacgctgaaagatctcttttctcgcccggtattgccggaaatgaccgacgtgcatttgccgcttaacctgaacattgaagagtttaagggcgagcagctgcgcgtgacgggcgacacggacatcaccgtgagcaccatgctgctgaaagtgagcagcattgacggcaatactaaactggacgccctggatatcgattccagtcaagggatcgtcaacgccagcggcacggcgcagctgagtgacaactggccggtggacatcactctcaacagtacactgaacgtggagccgttgaaaggtgaaaaagtgaagctgaaaatgggcggcgcgctgcgcgaacagctggagattggcgttaatctttccggtccggtggatatggatttacgcgcccagacgcgactggcggaagccggattgccgctcaacgtggaagtgaacagcaaacagctttactggccgttcactggtgagaagcagtatcaggcggatgatctgaaactgaaacttaccggcaaaatgaccgattacacgctctctatgcgtacggcagtgaagggacaggagatcccgcccgcgactattaccctcgacgccaaaggtaatgaacagcaggtcaatctcgacaaactcaccgtcgcggcgctggaagggaaaactgaactcaaggcgttgctcgactggcaacaggccattagttggcgcggtgagctaacgcttaacggcattaacaccgccaaagagttcccggactggccgagcaaactcaatggcttgattaaaacccgcggtagcctgtacggcggcacctggcagatggacgtgccggagttgaagctgaccggtaacgttaaacagaacaaagtgaacgttgacggcacgctgaaaggcaacagttatatgcagtggatgatcccagggcttcatctggaactcgggccaaacagtgccgaagtgaaaggcgagctgggggtaaaagatctcaatcttgatgccaccatcaacgcgccggggctggataacgcgctgccggggcttggcggtacagcgaaagggctggtgaaagtacgcggcacggtggaagcgccacaactactggcagatatcaccgcgcgcggcctgcgctggcaggaactttccgtggcgcaggttcgcgtggaaggcgatatcaaatccaccgatcagatcgccgggaaactcgacgtacgcgttgagcaaattagccagccggatgtaaatatcaacctcgtcaccctgaatgccaaaggcagcgaaaagcagcacgagctacagttgcggattcagggggagcctgtctccgggcagcttaatctggcaggaagttttgatcgcaaagaagaacgctggaagggaactcttagcaatacccgcttccagacgccggttggcccgtggagcctgacccgcgatattgcgctggattaccgcaataaggagcaaaaaatcagcatcgggccacactgctggcttaacccgaatgcggaactgtgcgtgccgcaaactatcgatgcgggggccgaagggcgtgcggtggtgaatctcaaccgcttcgacctcgccatgctgaaaccgtttatgccagaaaccactcaggccagcggtatcttcacgggtaaagcggacgttgcctgggacaccacgaaagaggggctgccgcagggcagtatcacccttagcgggcgtaacgtgcaggtaacgcaaaccgtcaacgatgcggcgctgcccgtggcgtttcagacactgaatctgacggcggaattgcgtaacaaccgtgccgaattgggctggaccatccgcctgaccaataacggccagtttgatggacaggtgcaggtgaccgatccgcaaggccgccgtaatcttggtggcaacgtcaatatccgtaacttcaaccttgcgatgataaaccccatctttacccgtggggaaaaagcagcggggatggtgagtgccaacttgcgtctgggtggtgatgtgcaaagcccgcagttgtttggtcagcttcaggttacgggtgtggatatcgatggcaactttatgccgtttgatatgcaaccgagccagcttgcggtcaactttaacggtatgcgcagcacgcttgccggtacagtacggacccagcagggtgaaatctacctgaacggtgatgccgactggagccaaattgaaaactggcgggcgcgggtaacggcgaaaggcagtaaagtgcggatcaccgtgccgccgatggtacgaatggatgtaagcccagatgttgtattcgaggctacaccaaacctgtttaccctcgatggtcgcgtggatgtcccttgggcgcgcatcgtggtgcacgatctgccggaaagcgcagtaggcgtctccagcgatgtggtgatgcttaacgataacctgcaaccggaagagccgaaaacggcgagcattccgattaacagtaacctgattgtccacgttggcaacaatgtgcgcattgacgcctttggcctgaaagcgcggctgacgggcgatctcaatgtcgttcaggacaaacaagggctgggtctgaacgggcagatcaacatccctgaagggcgcttccatgcctatggtcaggatctgattgtgcgtaaaggtgagttactgttctctggtccgccagatcaaccgtatcttaatattgaagctattcgtaacccggatgctacagaagacgacgtaatcgccggagttcgcgtcactggtctggcggacgaaccgaaagcggagatcttctctgacccggcgatgagccaacaagctgccttgtcttatttgctacgtggacaagggctggagagcgatcagagcgacagtgcggcaatgaccagcatgctgattggtttgggggttgcgcaaagtggccagattgtgggtaaaatcggcgagacgtttggcgtaagcaatttagcgctcgacacccagggagtaggcgactcctcccaggtagtggtcagcggctatgtattgccaggtctgcaagtgaaatacggcgtgggtatatttgactctatagcaacactcacgttacgttatcgcctgatgcctaagctatatctggaagccgtgtctggtgtagaccaggcactggatttgctctatcagttcgagttttaacaatgcgaatatttgtctacggcagtttacgccacaaacaaggcaacagtcactggatgaccaatgcccagttactgggcgatttcagtatcgataactaccagttgtatagcctgggccactatccaggcgcagttccggggaacggaacggtacacggtgaagtttatcgtattgacaacgccacgctggccgaacttgatgccttgcgcaccaggggcggtgaatacgcgcgccagttgattcagacgccgtacgggagtgcatggatgtacgtttatcaacgacccgtcgatggattaaagctaattgaaagcggcgactggttagacagggataagtaaccatatgcatacgccaccttcgggtggcgttgttttttgcgagacgactcgcattctgttttgtaattccctcaccttttgcttttctctccgagccgctttccatatctattaacgcataaaaaactctgctggcattcacaaatgcgcaggggtaaaacgtttcctgtagcaccgtgagttatactttgtataacttaaggaggtgcagatgcgtattaccataaaaagatgggggaacagtgcaggtatggtcattcccaatatcgtaatgaaagaacttaacttacagccggggcagagcgtggaggcgcaagtgagcaacaatcaactgattctgacacccatctccaggcgctacagccttgatgaactgctggcacagtgtgacatgaacgccgcggaacttagcgagcaggatgtctggggtaaatccacccctgcgggtgacgaaatatggtaaagaaaagtgaatttgaacggggagacattgtgctggttggctttgatccagcaagcggccatgaacagcaaggtgctggtcgacctgcgcttgtgctctccgttcaagcctttaatcaactgggaatgacgctggtggcccccattacgcagggcggaaattttgcccgttatgccggatttagcgttcctttacattgcgaagaaggcgatgtgcacggcgtggtgctggtgaatcaggtgcggatgatggatctacacgcccggctggcaaagcgtattggtctggctgcggatgaggtggtggaagaggcgttattacgcttgcaggcggtggtggaataaggtgtgtttatttatcgcgggcataaaaaaacccttactaaccgaagcccggcgttcagggttattacgccagaagaacttatttattctttgcgcgctcgaaggaggcaacgatttcagctttagcggcttctgcgttttcccaaccttcaactttcacccacttgcctttttcgaggtctttgtagtgctcgaagaagtgagcgatttgcgctttcagcagttcaggcagatcgttaacgtctttaatgtgatcgtattctttgctcagcttgctgtgcggaaccgcaaccagtttcgcatcttcaccggcttcgtcggtcattttcagaacgccaaccggacggcaacggatcacagaacccggctgcagcgggtacggagttgggaccagtacgtcaaccgggtcaccgtccagagacagggtgtggttgatgtaaccgtagttgcatggatagaacatcgcggtggacatgaagcggtcaacgaacagtgcgccgctctctttgtcgatttcgtatttgatcggatctgcgttagccgggatctcaataacaacgtagatgtcttccggcagatctttacccgcagggacgttgagtaagctcatgtctgtttcctttaaaaatatgtggcaaacaagtgccgagtattatagccaactcgcgccgaatgtcttcgcttgttttcgtcttcattttcctttttcaccagttttaagacggtatacagagcaggaaaatccataaccgtagccgcatttttcatagtgagatgaaagcgattacaaacttgtgattaacgttttatttacttttttgaagtgtgatgtaacgcaatctgttacataacgaattgtctatagttttttcgcgaacatcttttaaccaataataactaccccgacgaggacaaccctatgtggaaacgcttacttatagtctctgcagtcagcgcagccatgagctctatggcgttggccgctccattaaccgttggatttagccaggtcggaagcgaaagtggctggcgtgccgcagaaaccaatgtggcgaaaagtgaagccgaaaagcgcggaatcacgttgaaaattgccgatggtcagcaaaagcaggaaaaccagattaaagcggtacgttccttcgttgcacaaggggtggatgcgatctttatcgctccggtggtcgcgacaggttgggaaccggtattaaaagaggcgaaagatgccgaaatcccggtattcttgctcgatcgttccattgatgtgaaagacaaatctctctatatgaccaccgtcactgccgacaacatcctcgaaggcaagttgattggtgactggctggtaaaagaagtgaatggcaaaccatgcaacgtggtggagctgcagggcaccgttggggccagcgtcgccattgaccgtaagaaaggctttgccgaagccattaagaatgcgccaaatatcaaaatcatccgcagccagagtggtgacttcacccgcagtaaaggcaaagaagtcatggagagctttatcaaagcggaaaacaacggcaaaaacatctgcatggtttacgcccataacgacgacatggtgattggtgcaattcaggcaattaaagaagcgggcctgaaaccgggcaaagatatcctcacgggttccattgacggtgtaccggacatctacaaagcgatgatggatggcgaagcgaacgccagtgttgaactgacgccgaatatggcaggtcccgccttcgacgcgctggagaaatacaaaaaagacggcaccatgcctgaaaagctgacgttaaccaaatccaccctttacctgcctgataccgcaaaagaagaattagagaagaagaaaaatatggggtattgagggttgctatgcctgatgccgattcgtaggccggataaggcgctcgcgccgcatccggcgatggtgcactgaagcctgatgcgacgcttaccgcgtcttatcatgcctactgggagcacgctttacaccgggggaaaccatgacgaccgaccaacaccaggagatcctccgcaccgaaggattaagtaaatttttccccggcgtcaaagcgttagacaacgttgatttcagcctgcgccgtggcgaaatcatggcgctgctcggtgaaaacggggcgggaaaaagtacgctaatcaaagcattaactggtgtataccacgccgatcgcggcaccatctggctggaaggccaggctatcagtccgaaaaataccgcccacgcgcaacaactcggcattggcaccgtctatcaggaagtcaacctgctacccaatatgagcgtcgctgataatctatttataggccgcgaacccaaacgcttcggccttctacgccgcaaagagatggaaaagcgcgccaccgaactgatggcatcttacggtttctccctcgacgtgcgcgaaccgctcaaccgctttagtgtcgcgatgcagcaaatcgtcgctatttgtcgggctatcgatctctctgccaaagtgctgatcctcgatgaacccaccgccagtctcgacacccaggaagtggagttactgtttgacctgatgcgtcagttgcgcgatcgcggcgtcagcctgatttttgtcactcactttctcgatcaggtctatcaggtcagcgatcggatcaccgtcttacgcaacggcagtttcgtaggctgtcgggaaacgtgcgagctaccgcagatcgaactggtaaaaatgatgctggggcgcgagctggatacccacgcgctacagcgtgccgggcgaacattgttgagcgacaaacccgttgccgcgttcaaaaattacggcaaaaaaggaacgatcgcaccgtttgatctcgaagtacgccccggcgagatcgtcggtctggctggattgctgggaagtggacgtaccgaaaccgccgaagtgatcttcggtatcaaacctgctgacagcggcacggcgttgatcaaaggcaaaccgcaaaacctgcgaagcccacatcaggctagcgtactgggcattggcttctgcccggaagacaggaaaaccgatggcatcatcgctgccgccagcgtgcgggaaaatatcatcctcgctctccaggcccagcgcggctggctacgtcccatttcccgcaaagaacagcaagagattgccgaacgctttatccgccagcttggcattcgcacacctagtactgaacaaccgattgaatttctctccggcggcaatcagcaaaaagtgttgcttagtcgttggctactgacccgaccgcaatttctgatcctcgatgagccaacccgcggcattgatgttggtgcccacgccgagatcatccgcctgattgaaacgctatgcgccgatggtctggcgctgctggtgatctcctccgaactggaagagctggtgggctatgccgatcgggtgattatcatgcgcgatcgcaaacaggtggcggagatcccgctggcagagctttccgttccggcgatcatgaacgccattgcggcgtaaggagaacagtgtgatgcctcaatctcttccggacaccactacgccaaaaaggcgctttcgctggccgacggggatgccgcagctggtagcactgttgctggtgctgctggtcgatagcctggtagccccgcatttctggcaggtggtgcttcaggatgggcgtttgttcggtagccccatagacattcttaaccgtgcagctcccgttgcgttactggcgattggcatgacgctggtgatcgccaccggtgggattgatctctccgtaggggcggtgatggctatcgccggagccacaacggctgcgatgacggtcgcgggattcagcctgccgattgttttgttaagcgccctgggcaccggcatcctggcgggattgtggaacggcatactggtagcgatcctcaaaattcagccgtttgtcgccactctgatcctgatggtcgccgggcgcggcgtggcgcaactgatcaccgccgggcagatcgtcacgtttaacagcccggatctcagttggttcggcagtggaagcctgttgttcctgccaacgccggtcattatcgcggtgctgacgcttatcctgttctggctgttgacccgcaaaacggcgctggggatgtttatcgaagccgttggtatcaacattcgggcggcaaaaaatgccggggtaaacacgcgaatcatcgtcatgctcacttatgtgttgagcgggctgtgtgcggcgattgcgggcattatcgtggcggcggatattcgcggtgccgatgccaacaacgctgggttatggctggagctggacgccattctcgcggtggtgattggcggcggaagcctgatgggcgggcgctttaacctgctacttagcgtggtgggggcgctgattattcaggggatgaacaccggaattttgcttagcggctttccgccagagatgaaccaggtggtgaaagcggtggtggtgctttgcgtgctgattgttcagagccaacgctttatcagtctgattaaaggagtacgtagccgtgataaaacgtaatttgccactgatgatcaccatcggcgtctttgtgttgggttatctttactgcctgacccagtttcccggttttgcttccacaagagtgatctgcaatatcctgaccgataatgcctttcttgggatcattgccgttggcatgacctttgtgatcctcagtggtgggatcgatctctccgtcggtagcgtgatcgcctttactggcgtgtttctggcaaaagtgattggcgatttcggcctcagcccgctgctggcgtttccgctagtgctggtgatgggctgtgccttcggcgcatttatggggcttctgatcgacgccctgaagatcccggcatttatcattacgcttgcggggatgttctttttgcgcggcgtcagctatctcgttagcgaagagagcattccgataaaccatcccatttatgacacgctcagtagccttgcgtggaaaatccctggcggcggtcgcttaagtgcgatgggactgctgatgttggcggtggtggttatcggcatattcctcgcgcatcgtacccgttttggtaatcaggtatacgccattggcggcaacgcaacgagcgcgaatctgatggggatttccactcgcagcaccactattcgcatttatatgctctccaccggactggcaacgctggcggggattgtcttcagcatttatacccaggccggatatgcgctggcgggcgtaggtgtggaactggatgctatcgccagtgtggtaattggcggtacgcttttgagcggtggcgttggaacggtattagggacgctttttggcgtggcgattcagggactgattcagacttacataaactttgatggcacgctgagttcctggtggacgaaaatcgccatcggtattttgttgtttatttttatagcattacagcgtggattaacggtgctgtgggagaatcgtcagagtagcccagtgacaagagtcaacattgcgcagcaataaaaacgcctctccgtgtggagaggcgcaggagattacgcgtccgggaactcacggataaagcgttcgacatcttcaaccatatggtcgttgccgacaaagaaactacggcgctggtgcagggtttccgggatgatatccagaatacgctctttgccatcgctcgctttaccgcccgcttgttccgccaggaatgccatcgggttgcactcatacagcaaacgcagtttgccgtccgggtggctggcggtgcttgggtagagataaataccgcctttcagcaggttacggtggaaatccgcgaccagactaccgatataacgactggtataagggcggttggtggatttatcttcttcctggcagaatttaatgtacttcttcaccccgttcggaaacttaatgtagtttccttcgttgatggagtaggttttgcctttctccgggaagcgcatccgttcctggcacaggcagaaaacgccgaggctaggatcgtaagtaaaggcgtgaacaccgcatccggtggtgtaaaccagcatggtagaggagccgtataccacgtaacctgccgcaacctgtttgttaccaggctggaggaaatcttcttccgttaccggcgtgccaacaggcgtaacgcggcggtagatggagaaaatggtaccgacagagacgttaacatcgatgttggagctgccatccagggggtccatcagcaccacgtattttgcgtgttcacagccttcaaagacgacaatctcatcttcttcttcagaggcaatgcccgcaacgatatcgcgtgctttcagtgcggctttcagtttttcattagcgaacaagtcgagtttctgctgaacctcgccctgcacgttctcagcaccgctggcacccaggatatcaaccagtcctgctttgttgatatcgcgatggataatcttggcgcccagttttattgcgctcagcaaagcagtgagctcaccggtagcatgagaaaactcgtgctgcttttcgacaataaattcacctaacgttttcataaaactttccctgcaatgtttatggagtaaagcgaccgcaacaatcttaacaaataatctcaatgttgcgctcaggtgaatcgcgccagcaaattacggattatcctgaaatgcgtttctcacttgcccgacatatgcgtaaaatgagcggcagattaaaaaaggatagtgacgtatgcgcattcatattttaggaatttgtggcacatttatgggcggtctggcgatgctggcgcgccagttaggccatgaagtaacgggtagcgacgccaatgtgtatccgccgatgagcaccttacttgagaagcaaggcattgagctgattcaggggtacgatgccagccagctcgagccgcagccggatctggtgattattggcaacgccatgacccgtggaaatccgtgtgtggaagcggtactggaaaaaaatatcccttatatgagtggtccacagtggctgcacgattttgtgctgcgcgaccgctgggtgctggccgttgccggtacacacggcaaaaccaccaccgcgggaatggcgacctggattctggaacagtgtggttacaaaccgggctttgtaatcggcggtgtgccggggaactttgaggttagcgctcatctgggcgaaagcgacttctttgttatcgaagcggatgagtatgactgcgccttcttcgacaaacgctctaaatttgttcattactgcccgcgtacgctgatcctcaacaaccttgagttcgatcacgccgatatctttgacgacctgaaagcgatccagaaacagttccaccatctggtgcgtatcgttccggggcagggccgtattatctggccggaaaatgacatcaacctgaaacagaccatggcgatgggctgctggagcgagcaggagctggtgggtgagcagggtcactggcaggcgaaaaagctgaccaccgatgcttccgaatgggaagttttgctggatggcgaaaaagtgggcgaagtgaaatggagcctggtaggcgaacataatatgcacaatggcctgatggcgattgcagcggctcgccatgttggtgtagcgccggcagatgccgctaacgcgctgggtagctttattaatgctcgtcgccgtctggagttgcgtggtgaagcgaatggcgtcacggtatatgacgattttgcccatcacccgacggcgattctggcaacgctggcggcgctgcgtggcaaagttggtggtacggcgcgcattattgctgtgctggagccgcgcagcaataccatgaaaatggggatctgcaaagacgatctggcacctagtttaggtcgtgccgatgaagtcttcctgctgcaaccggcgcatattccgtggcaggtggcagaagtggcagaagcctgcgttcagcctgcacactggagtggcgatgtggatacgctggcagatatggtggtgaaaaccgctcagcctggcgaccatattctggtgatgagcaacggcggttttggtgggatccatcagaaactgctggatgggctggcgaagaaggcggaagccgcgcagtaattcggccttagccagatatagtatgcgtaggccggataaggcgttcacgccgcatccggcatttgagcatagtgcctgatgcgacgcttgatgcgtcttatcaggcctacaggtgcaccgtatccggcaaaccatactcacatcaacaacgaaaattacccttcgttctccgctaactcgcgcagatactggaaaatctggcgtgcggatttcggcggcttattcccttctttctctttcttcgcgttgcggatcagagtacgcagttgctgacgatcggcatcgggccacagatttaatacctcagcgatggcgtcatcaccttgatcgatcagacgatcgcgcaggttttccagtttatggaacagcaccacctgctggttgtgacggtttttcagcttatccagcgcctgacgaataggctctacgtcgcgctggcgcagcatcttaccgatgagctgcaactggcggcggcgaccttccatcttaatacgctgggcgagctcaatagccgcgcgcagatccgcatctaacgggatcttatccagcgcgtttttccccagatcaacaatttccgcgccaaggcgttttagctcctcggcatcacgtttaatttcacttttactgacccagataatttcatcgtcttcgtcttcgatgtcatcaccgggaacgtcgtcgagccagtcttcgggctgcttagtcatctcaggctccttaaaaaaagaggctaatgttaccagttaagatgcgcactgaaaaacggttctctgttagacttcagagaaactctctacattatggcacttgcaatgaaagtaatctctcaagttgaagcgcagcgcaagattctggaagaagcagtttccactgcgctggagttggccagtggcaaaagcgacggtgcggaagttgccgtcagcaagaccaccggcattagcgtaagcacgcgttatggtgaagtggagaatgttgaattcaatagcgatggcgcgctggggatcactgtttatcaccagaaccgcaaaggtagcgcaagttccaccgatttaagcccgcaggccattgcccgtactgtacaggcggcgctggatattgcccgttataccagcccagatccctgtgccggcgtggcagacaaagagctgctggcctttgacgcaccagatctcgacttgttccaccctgcggaagtttccccggatgaagccattgaactggcggcccgcgcagaacaggcggcattgcaggcggacaaacgcatcaccaataccgaaggtggcagctttaacagccactacggtgtcaaagtttttggcaacagccacggcatgttgcagggttactgcagtacgcgtcatagcctctccagctgtgtaattgccgaagaaaatggcgatatggagcgtgattacgcctacaccattggtcgtgcgatgagcgatctgcaaacgccagagtgggttggggccgactgtgctcgccgtactttaagccgtctgagtccgcgtaaactctccaccatgaaagcgccagtcatttttgccaatgaagtggcaaccgggctttttgggcatctggtgggggcgatagcgggtggaagcgtttatcgtaaatctaccttcctgctggatagcctgggtaaacaaattctgccggactggctgaccattgaagagcatccgcatctgctgaaagggctggcgagcacgccattcgacagcgaaggtgtgcgcaccgagcgtcgcgatattattaaagatggcatcctgactcagtggctgctgaccagctacagcgcgcggaaactggggctgaaaagcaccggacatgcgggcggtattcacaactggcggattgccggacaaggtctaagcttcgagcagatgctcaaagagatgggcaccgggctggtggtgacggaattgatgggccagggcgtgagtgccattaccggtgattattcccgtggtgcagcgggcttctgggtagagaatggcgaaattcagtatccggtgagcgaaatcaccatcgcaggtaatttaaaagatatgtggcgcaatattgtcaccgtcggtaacgatattgaaacacgcagtaatatacagtgtggttctgtgctgttgccggagatgaaaatcgccggacagtaaaaaaactggcgcgacctgccgcgctataaactaaaaaattacacaaaatcattcgcactgcatcgagacggaaagtgaatgagggccggggagcgtactcgcagtacgtgacccggtcgaatgagcgtagtcgtcgatgaggcagtgtgaaggatgaagtgtaaataaaaaaggaactattcttgcagtctcctcgttggtattcagttcggcgtcatttgctgctgatctcgaagacaatatggaaaccctcaacgacaatttaaaagtggtcgaaaaagccgataacgcggcgcaagtcaaagacgcgttaacgaagatgcgcgccgcagcgctggatgcgcaaaaagcaacgccgccgaagctcgaagataaaagtccggacagcccggaaatgaaagatttccgccacggtttcgacattctggtcggtcagattgacgacgcgctgaagctggcaaatgaaggtaaagtaaaagaagcgcaggctgctgcagagcaactgaaaacgacccgcaatagttatcacaagaagtatcgttaattcctcatttccctgttgcctgcactcaggtaacagggaacttatcatcgcaaatgatgcaccacctgattgctgctgccgcgccagatcagggaagggtcttttaaatcctgcacaaatttgccgtcgaccagcacgttaatcaaatcaacaacctgcatttgcgcagcgttgagttcgtcgagtttatagcctgtccacacccagatgtctttacccggacactcggcgcggatgcgttgtaccagtttcagaatatccggcacgttttgcggatgcagcggatcgccgccggagagggaaataccctggcgtttgatacgagtgtcattcagatcgttaatgatctggtcttccattgctttggtaaatggctgaccggaatttacccgccatgtgcttttgttatagcaaccggggcattcatgaacacacccggagacaaacagggtgcaacgagtgccggggccgttgacgatgtcgacaggatagtactgatgataattcattatttcgcctggcttatcagtccgcgtgtaggctgcatccggtaatcaatgcctgatgcgacgctgtcgcgtcttatcagacctggagcaattgccaaatgtaggccggataaggcgtttacgccgcatccggcatttgcttagctcagagtgaagattaacctatctgcccattccccaaatgtttaacgcggcgcttaacttcttcctgcttaccagcgttaaacggacgtgcatccgggctacctaaatatccgcacacgcggcgagttacgctcacacgggaggcgtcatggttaccacatttcgggcaagtgaagcctttgctggtgcactcgaactcaccggtaaagccacactcgtagcactcatcaatcggtgtattggtgccgtaatacggtacatgctgatagctgtaatcccagacatcttccagcgccttcaggttgtgctgaatgtttggatactcgccgtagcaaatgaaaccaccgttcgccagcggcgggtaaggcgcttcaaagtcgatcttgtcgtacgggttcaccttcttctccacatcgaggtggaaactgttggtgtagtaacctttatcggtcacgcccggcaccacgccaaactcagcagtatcgagacggcagaagcgatcgcacaggttttcactcggcgtgctgtagagactgaaaccataacccgtttcttctttccactgatccactgcctgacgcagacgttcaacaatggcgatacctttcgcgcgaagctgctcgttgtcgtaaacatgctcgccgccgaacagcgcgttaatggtttcgtggatgccgatgtaacccaggctaatagacgcacgaccgtttttgaagatttcagaaacatcatcgtcagcattgagacgcacgccacaagcaccttccatatagaggatcggggccacgcgcgctttcacgccttcgagacgagcgatacgggtcatcagcgccttacgtgccagcaccagacgttcatccagcagcttccagaaggtggcttcatcgccttttgcttccagagcaatacgcggcaggttcaggctgatcacgccgaggttgttacgaccatcgtggatctgctcgccgttttcattttcccacacgccgaggaagctgcggcagcccatcggagttttaaagctaccggtgactttcactacctgatcgtagttcaggatatccggatacatgcgcttgcttgcgcactccagcgccagctgtttgatgtcgtagttcggatcgccttttttatggttcaggccatcgcgaatcgcaaacaccagtttcgggaacaccgcagttttacggtttttaccgaggcctgcgatacggttacgcaggatgctttcctgaatcaggcggctttcccagctggtgcccaggccaaaaccaaaggttacaaacggcgtctgaccgttggcggtgtgcagggtgtttacttcgtactccagactctggaaggcatcgtagcactctttgatggttcgagagttagcgtagccttcggcgtccgggatgttccactcttctgcggtcttgcgatgtttgttgtagctggcagtgacaaacggtgccagcacttcatcgatacggttaatggtggtgccgccataaatatggctggcaacctgagcaataatctgcgcagttaccgcggttgccgtagagatgctcttcggcggttcaatctcggcgttccccattttaaagccctgggtcagcatgcctttcaggtcgatcaacatgcagttgaacatcgggaagaacggactgtaatcgagatcgtgatagtgaatatcgccacgctcatgtgcctgcaccacgtcacgcggcagcaggtgctgacgtgcatagtgtttagccacgatcccggccagcaggtcgcgctgggttggaatcaccttgctgtctttgttggcgttttcgttgagtaagctggcgttggtctgctcgaccagaccacggatctcctggttcaggcgaccgcgtttttcacgttcaatgtcgcgatcgtgacggtactcgatgtaagcacgagccagttgtttgtatggaccactcatcagctgattttcaactgcggtctggatctcattgatatccacctggttgcggccctgcatctgctcgctgacaaccgcggcaacagtggcgcaataatcggcatcatcgacttccgctgctttagctgcacgcagaatcgcttctttgatgcgctcacttttaaacggcactttgcagccgtctcgtttcatcacatgcggtgtcatgatcgctccatatttttaagaacaggttatccacagaaattgggaaaggcgttttccggttttttcgtttcgttttccggtgctttccgcaatcgccatccgcttatccacaacgccgcacctttttcgtggggagctgtagtagcaattatagtcgattaatacaacatattgggttgggacgcattttaaagtctatatatagtgctttgcatcaaggatgtttgagctttttttgatgtagctcaaagtaaaaagcagagcgtacggatgacgggcgctacagcgatatgtaaattttttaatgaatttgctggttgaaaaatcaacaaaaacaacatactgacagacaaaaccccggaatgaccggcattaccggggcttagggaagatttacttctgtaaccaccagacagcctcaaaaggccgtaaattcatggcacagggttgtggactggcttcttcgtagttatgcatcacaagctgccagttgccgcgcatttgccctgcctgccagggttggatctcacggctaaggttggcaatgaccagcaaggtttgccccttccattcacggcgatagcaccacaatacagggctgtttggcagcagatcctggtaattgccccatgtcaggatggcttcctgcttacgcagtgcgattaacttttggtaggtgtaaaacacgctggaatcatcggccagcgcggcttctacgttgatttgttgatagttatcgcccaggccaatccacggttcgccagccgtaaacccggcattatcgccgttgctccattgcatgggcgtgcgactgttgtcacgggatttactggcgaggattgccaataactcgtcggcatcacgcccatcgttgcgcagctcggcaaacatattgaggctctctacgtcgcgatagtcagtaatgcgcgtgaaatgcgggttggtcatgccaatctcttcgccctggtagatatacggcgttccctgcatgccatgcagcaccatcgccagcatttttgccgcaggcacgcggtattcaccttcatcaccaaagcgagaaacaatgcgcggctgatcgtggttacaccagaacaaggcattccatgctacgttgtgcattccttgttgccagtggcggaacaatgttttcaacgccacaaagtcaggtttagccagcgtccatttttcaccaccgggataatcgaccttcaggtgatgaaaattaaaggtcatgctcaattcactgcctgtcagagccgcgtatcgctggcaatgctcaaggctggtggaggacatttcacctacggtcattaacccgcgtggcgtaaacacatcgcggttcatctcgtgcaaaaactcgtgtgctcgtggcccgtcggtgtagaagcgacgcccgtcgccgtccaggtcttcagggaaacgcgggtctttggagatcagattcaccacatccaggcgcaacccgtcgaccccacgatcggcccagaactcacagacttttttcagctctgcgcgtaccgctggattctcccagttgagatccgcctgttctggtgcaaagagatgcaaatagtactgttcgctttccgcatgccagcgccacgcactaccgccaaatttactacgccagttgttcggtggcgtttctggttctccatcgcgccagatataaaactggcggtaagggctttctttgttcagcgcctcgcgaaaccaggcatgttgggtagaggtatggttaaacaccatatcgagaatgatacgaatcccgcggctttttgcctgcgtcaccagttcgtcaaaatcgtccagcgtgccgtaggtgggatcaatcgccgtatagttcgctacgtcgtaaccgttatcgacctggggagagacataaaagggggttagccagatggcatcaacgcccagtttatgcagatagtccaggtgttggataacgccacgtaaatcgccggtaccgctacccgtggtgtcctgaaaactctttggataaatctggtagataacgccgttttgccaccagtggggaagatgagtcattacgttattcctgcgaatgcgagggggcgcaattgcgccccgaagaaaattaaacaatgtccagcgtgcccaggcggtatttccgctgatagataaagctggtgagtacaatcgggatgatgatggcgatagccattgccagcgcaaacacctgccagtagctcggttgaatgctgagaattcccggcaggccgcctacgccgatgccattcgccataacgccgttcaggccgcatagcaatcctgccagaccagaaccaatcatcgcgcacagcatcgggaagcgatatttcaggttgatgccgtacattgcaggctcagtgaccccaagccaggcggagatagcggcaggcacggagatctcgcgttcattgtgcttgcggctggaaatgataatgcctatcacggcggagccctgagcgatattgctcagcgcaatcagcggccacactggcgtaccacccatgctttgaatcatctgcaaatcaatagcaagcgtggtctggtgtacaccggtgatcaccagcggggcgtacaggaagccaaacaatgctgcgccaatcggagcaaagctgccggtcatcaggtgacgtaccgcaaaggcaacgccatcgccaatcatgcgaccaaacggaccaatcagcgcatgggcgaggaacaccgcgaggatcaggctacagacgggtaccaccaccagatagaggtaatccggcacgatgcgtttaaggcgagtttcaataacgcccagcgccagtccggctaacagtgccgggatcacctgcgcctgatagcctactttggcgatgctgaacatgccaaagtcccacacttccggcagctgctgcccgagcagataagcgttcatcagctgtggagaaaccagtgtcacgccaagcacgataccaaggatcggcgtgccgcccatttttttcaccgcactccagcaaataccgaccggcaggtagaagaagatcgcttcaccgatcaaccacagaaaatcgtagatcgtttgcagggaagggtacatttgcgccagcgtctgaccgttgctcatgggcaaatcgccgatcacattgcgaaaaccgaggatcaaaccgccgctaatcaacgcgggcagcaacgggaagaagatcaccgcgaaatgagagatcaactgctcatgccatttcatattatgccgggcggctttttttacctgctctttatcaacctgcgcctgtccggtactcgcaatcagtgcttgatagtaatcacccacgttggtgccaatcaccacctgaaattgcccggcattggtgaaacagcctttcaccatagggagttgctcaatttctttcggtctggcattggccggttggttgaggacaaagcgtaggcgagtaatacagtggctcaccgtcgcaatattgccgcgcccgccgaccagttcaatcaaccgatcgatatccgtttggtttattttgctcatcataaagccccatggcagatgacatttttggttggctgcagaatatattgcgcggaaaaatttaaaaacgggaacgttcccgaaacgcagcgaagatcacaatttatcgttcaggaaacgatcaggacagggtggcggggatgatgatttgttgcggttcgctgcgcccggttacctgcgcgatcaactggcaagccgcctggcgtccagcttcggcgtaaccgggatctacggttacgatctccggatggaggaatttcattaacggcgtattaccgacgctcgccagttgcaaggtgtcgatgcgttgctcttgcaggtatttacttgcgccaagtgccagcgtgtcggttgcgcacagtaaggcggtagtttcaggcgtaatcacttttgcaacgttctcatagccttgcttcatagcaagccctggcagggcggcaacgggatgcagtttatgcgctttgcagaacgccaggtaggcttcgtgacgtcgcttaccggttgtcacgtcactgtgcggcacgccgagataactgatattacgatgcccctggtcatacagccgttgcatcaggattttgattgccccttcgtcgtcataacagacgctagcaaagccttttgcgtcacgcgccagcagaaccaggctactctgccagtgggctaacatttcttctgttatgccagtaaaaccgaacagcactacgccgtcgatattacgccgtttcagcactcccaaatgttcggcaactaattgcggggaaaactgactttccatcatgattgggtcgtaaccttgttcatagaacgctggcagcatggtttgaacggcgagattttcactcaagctatccagacgggtaacaatgatggcgaccactttatcgctttgcccacgcatagcgcgcgcagagcgggaaggggaaaatccatgctgattcatcactgcttcaacacgctcgcgggtgagctggctcacgccgctttcgttattcagcacccgggaaactgtagatttccccacgccgcttaagcgcgcgatatctttgatggtcagccgattttgcatcctgttgtcctgtaacgtgttgtttaattatttgagcctaacgttacccgtgcattcagcaatgggtaaagtctggtttatcgttggtttagttgtcagcaggtattatatcgccatagatgctacgaatattattggattctccttattatttgcggcgcttttttcacttaccggaggttatatggaacctgatcccacgcctctccctcgacggagattaaaacttttccggtaagcccgtcttttcacggcgttaccggatgcgtaaggccgtgacgttttaacgtccctgctcagctttattaccttcaggtaaggcttcgccacgcctgaagacatttctgtactgtttcagacagtgcggagggactccttatgtttaaagaaatttttacccggctcattcgccatttaccttcccgtctggttcatcgtgatccattgcctggcgcgcagcagacagtgaatacggtggtcccgccgtccttaagtgcgcattgcctgaaaatggcggtgatgcccgaagaagaattgtggaaaacgttcgacacccatccggaagggttaaatcaggcggaagtggaatctgcccgcgaacaacatggtgaaaataaattacccgcacaacaaccgagcccgtggtgggtacatttatgggtctgctatcgcaacccctttaatattttactcaccattctcggcgctatttcttacgccacggaagatttatttgctgcgggcgttatcgcgctaatggtcgctatttctacgttgctgaactttattcaggaagcacgttccactaaagcggcagatgccctgaaagcgatggtcagcaatactgcgacggtgctgcgcgtaattaacgacaaaggcgaaaatggctggctggagatcccgatcgaccagctggtgcccggcgatattataaaactggcggcgggagatatgatcccggcagatttacgtatcttgcaggcgcgggatctgttcgtcgctcaggcgagcttaaccggtgagtctctgcccgtagaaaaagccgctaccactcgccagccggagcacagcaatccgctggagtgcgacacgctgtgttttatgggcaccaccgtggtgagcggcacggcacaagcaatggtgattgctacaggtgccaatacctggtttggtcaactggcggggcgtgttagtgagcaggaaagcgagccgaatgcctttcagcaagggatcagccgcgtcagtatgctgctgattcgctttatgctggtgatggcaccggtggtgctgttaatcaatggttacaccaaaggcgactggtgggaagcggcgctgtttgcgcttagcgtcgcggtaggcctaacgccggaaatgttgccgatgattgttaccagcacgctggcgcgcggcgcagtaaagctgagcaaacagaaagtgatcgtcaaacatctggatgctattcagaactttggcgcaatggatattctgtgcactgataaaaccggcaccctgacgcaggataaaattgtgctggagaatcataccgatatctccggtaaaaccagcgaacgcgtgctgcatagcgcgtggttgaacagtcattatcagaccggacttaaaaacctgctcgatacagcggtgctcgaaggtacggatgaagagagtgcgcgcagcctggccagtcgttggcaaaaaattgatgagattccgtttgatttcgagcgtcgccggatgagcgtggtagtggcagaaaataccgagcaccatcagctggtttgcaaaggtgcattgcaggaaatcctcaatgtgtgtagccaggtgcgtcacaatggcgagattgtgccgctcgatgacatcatgctgcgtaagattaagcgggttactgatacgctgaatcgtcaggggctgcgcgtggttgcggtggcgacgaaatacctgccagcgcgtgaaggagattaccagcgggcggatgaatccgacctgatcctcgaaggatatattgcttttcttgatccgccaaaagagacaaccgctccggcactgaaggcattaaaagcgagtggaattaccgtaaaaatccttactggcgacagtgagttagttgcagcgaaagtgtgccatgaagtggggctggacgcgggagaggtggtcattggtagtgatattgaaacgctatctgacgacgaactggcaaatcttgcacagcgtaccacgctgtttgcccgcctgacgccgatgcataaagaacgcattgtgaccttactgaagcgcgaagggcatgtggttggctttatgggcgatggtattaatgatgcgcccgccttacgcgctgcggatatcggcatttctgtggacggcgcggtagatattgcccgtgaagcggctgatatcatcctgctggaaaaaagcctgatggtgctggaagagggggttattgagggacgtcgcactttcgccaacatgctgaaatacatcaaaatgacggcgagctctaacttcggtaatgtgttcagcgtgctggtagcgagtgctttcttgcccttcctgccgatgttgccgttacacttgcttattcagaacctgctgtacgatgtgagtcaggtggcgatcccgtttgataacgtcgacgacgagcaaattcaaaagccgcagcgttggaatccggcggatctggggcgctttatgatcttcttcggaccgatcagcagcatcttcgatattttgacgttttgcctgatgtggtgggtattccatgccaacacgccggaaacgcaaacgctgttccagagcggatggtttgtggtgggcttactgagccaaacgctgattgtgcatatgatccgcacccgccgtgtgccgtttattcagagctgtgcaagctggccgttaatgatcatgaccgtgatcgtgatgattgtcgggatcgcattgccgtttagtccgctggccagttatctgcaattacaggcgctgccgttaagctatttcccgtggctggttgcgattctggcagggtatatgacattaacccagttggtgaaagggttctatagccgtcgttacggctggcaataaagaataaactgggcacgatagccccgattcagattgtagacaaagtgagttttgttcatgccggatgcggcgtaaatgccttatccggccaacaaattcaataaattgcaggaatcacgtaggcctgataagcgtagcgcatcaggcgattttgcgtttgtcatcagacttaatccgggcatgatagcccggatttccatcaagattagcgacgaacagcgatcgcttcgatctcaatcttcacgtctttcggcagacgggcaacttcaacgcaagaacgtgccgggaaggtggcgttgtgttcggtgaagaaggcttcgtaagtggcgtttacggttgcgaagtcgttcagatcttttacaaacacggtagttttaacgatgtcgcccactttcaggccagcggcttcgacgatcgcttttacgttatccaggctctgacgtgcctgtgcagcgacgtctgccggtacttcgcccgttttcggatttaccgggatctgaccggaggtgatgatcatattgcccagatcaacgccctgtacgtaaggaccgatagctgccggtgcattttccgtcgcgatagttttgctcatgatttctcctttattacagcggtaaaaagtctggctcattatagggagccagacttttattaccaaccgcaattaattggccagcaccacattatgggaaaactctttttcacagtatttgcatttgagcgcgatatcattggcgcgttttcgcacggcaaagctggaactaaccggttcggcatggctgatacagttgctgttcgggcagaccagcacattgtcgatgcgctccggcagacttgggcggcttttacccaccacttcatagttgtcgatacggttaaccgtggcttgcggcgcatacaatgccagttgatctacttgatcttcactcaaaaaggtattttcgattttgatcagatctttgcggcccatctcgccagaaggcaggttcagaccaatggtgatgcgctgatccgtttcggtcagcttgaacagactcaacagcttaaaaccgatctgggcggggatatggtcaattaccgtgccgcgtttaatagcttcaacctgcaatttattatcgtgtgtcatctctatttccccttacagtaccagatcgcgattcagaaccagtgccagtaacgcctggcgagcgaaaatcccgttgcctgcctgctggaagtaccaggcgtgtggcgttttatcaacatccgtcgcaatctcatcaacacgcggcagcggatgcagcactttcatattggctttggcgttgtggagatcgctggcgcgaagaacaaactgcgctttcacgttggcgtactcggacgggtccagacgctctttttgcacgcgggtcatgtacaggatgtctacttccgccatcacttcttcaatagagctgtgcagactccatgcgatccctttttcatcgagcatatccagaatgtattgcggcattgccagcgcgtccggcgcgatgaagtaaaaacggttgccgtcgaacttcgctaacgcctgagtcagggagtgaacggtgcggccatatttcaggtcaccaaccattgcgacgtggagattgtccagacgcccctgggtttcctgaatagtgaataagtccagcaaggtttgcgtcggatgttggttggagccatcaccggcattcagtaccggtacattgccggaaaactcggtggccaggcgcgccgcaccttcctgcggatgacgcatcactatcgcatcgacgtaagtgctgataacgctaatggtatcggccagcgtttcgccctttttacccagacttgtattggcgctgtcggagaagcccaccacgctggcccccaggcggtgcatagatgtttcgaaagagaggcgggtacgggtagaggcttcgaagaaacagctggcaatgactttgtgcttcaacagctctggttgcgggtttgctttcagtttcgccgctgtcgccagcaccagattaaggtcatcgcgactaaggtcgtttatggaaatgatatgtttctgatatagcggattagccatcttttatctcctgacgcctgggcaaaaaaaagcccctcgattgaggggctgggaatgggtgatcaacgggaagaaaaacggcaggccagcgtcttttttcagacgcggtaagacaaaatgtcgaacacactgaaccatacatcctcccggcaaattgtccggcattatactcatcgtcagaagcggcgcaagcatttgatgcaatattttgtcagcgcaaacggtttatttgaattaaaagtcaaggtatatgcatttttatttgatgtgattctgcaggggaactgtccttcggtatcaataattgcagacattccctgctttttcctttttcactttcacgcaatcagatatgcattttattccattcatccgacttatagggcggagtgtgaaagcgaacggctaacactattgcttactgctcagggatgcgcgctatcactttaatttcaaaatcaaagcctgccagccatgtaacacccaccgccgtccagtttggataaggtggggcgctaaatatttcatttttcaccgtcatgatgtcttcaaattggttttctggatcggtatggaagctcgtaacatcaatgatatcgtcaaaagtgcatcccgcagctgccagggtcgcatgcaaattatcaaatgccagtctgacttgttgctgaaaatcgggttctggtgttccgtcctctcgacttcctacttgcccggaaacaaacagcaaatcgccggaacgaatagccgcagaataacgatgctcagcatatagactatgtcggccagcagggaaaacagcggttctttctaccatttggttatcctcaagatttacgacatgaacagaagatttctctttaccgggagccgcttttagcggacgacgtgagtaaacaaaacccagacatcatggataatggctgggcttaattgagcgtagtcggttatgcgccaaacgcgccatcaatggtatgcatcgcgccggtaacaaaactggcttctggccctgctaaccatgcgaccataccagcgacctcttccggttgcccatgtcttttgatagccatcaaactatgcaacatatcgcgcattggcccgttggcgggattagcgtcggtatcaattggccctggctggacgacgttaatggtgatcccacgcggtccaaaatcacgggccagcccgcgcgccatgccttgcagggcagatttgctggcggcataagcagccatgcctgcaacaggcatacgatcgccattcacggagccgatgattaagatgcgcccgccttcgggcatctgccgggcggcttcaacagaggcatgataaggagcatgaatattgattttgaaaaggcgatcaatatcgtcggcatttaattccagggcctcgccaaagacgccaatacctgcatttaccaccaggatatccaatgcgccgctcttacgaacgacatcaatgacagcgtctctgtcagcactatctgtgaatactgctgtcgctccagtctcttgtgccaggcgtttagcggcatctttgctccccgcataggtgaatcgtacattggccccatcggtgacgaaacgacgtacgatagcggcaccgataccacgactgccaccgaggatgagaactgtcttacctgtaaaagcgcccataaggactccttgatttattatgtaacatgcattacaaaactgttttaactttctgtcaacaggttttgtaatggtcactaaaaaacaatctcgcgttccaggtcgtcccagacgtttcgctcctgagcaggcaatctctgcggcaaaagtgctttttcaccaaaaaggtttcgatgctgtcagtgttgctgaagttactgattatcttggtattaaccccccgagcctctacgcggcttttggcagtaaagctgggttatttagccgtgtactcaatgaatacgtcggtacggaagctattccgcttgccgatattcttcgtgatgatcgtccggtaggcgagtgcctggttgaggtattaaaagaagcggcgcgcagatatagccaaaacggcggctgcgctggctgtatggttcttgaaggtattcatagtcatgatccacaagcgcgtgatattgccgttcaatattatcacgccgcagaaacgaccatttatgactacatcgccaggcggcatccacaacgcgcacaatgtgtgactgattttatgagtaccgtgatgtctgggctttctgcgaaggcacgagaggggcactctatagaacaactctgtgcaacagctgcaatggcgggggaagcgataaaaactattcttgaggagtgatgcgggccttgacccgaaaggcgggaaagcgcctgccgataagttgtgataagacaataattcacgcgttaaggctagcggaattgattatcttttcgtataacgatagaaatgaaacgttgttttaattaaggagtggaaaagatgatcatcggaaatattcataatcttcagccgtggctaccccaggagttacgccaggcgattgagcatatcaaagcacacgttacggcagaaacgccaaagggcaagcacgatatcgaaggcaatcgactgttttatcttatcagcgaagatatgaccgagccgtacgaagctcgccgtgcggagtaccatgcccgctatcttgacattcagattgtgttaaaaggtcaggaaggcatgaccttcagcacgcaacctgcaggcgcgccggataccgactggttagctgataaagacatcgcatttttgccggaaggcgttgatgagaaaacagttattctaaatgaaggtgattttgttgtgttttatccgggggaagtgcataaaccgctgtgcgcagtgggcgcgccagcccaggttcgcaaagcagtagtgaagatgctgatggcgtgatgacttttcgccgtaaataactcaaggtttacggcgagtttgtgaaaagagcgttttttgatatttttttgtgagtaaaatttgtaatgcttagacgttcttattcactcaaggagttcgtcatgagcaaaataagtgatttaaattattctcaacacattacattagccgacaattttaaacaaaaaagtgaagttttaaatacctggcgtgttggaatgaatgattttgcccgtattgccggggggcaggataacagaaggaatattctttctcctggagcatttttagagtttttggcaaagatatttaccctgggttatgtggattttagcaaacgctccaacgaagcgggtagaaatatgatggctcatattaagtccagttcttattctaaagatactaatggcaatgaaaaaatgaagttttacatgaataatcctgtaggggaacgagcggatagtcccaaggtgattatagaaattagtctttccactatcactactatggggactcgtcaaggacatacagccattatatttccacaacctgatggtagcactaaccgttatgaagggaagtcctttgaaagaaaagatgagagtagtttacacctgattactaacaaggttctggcgtgttaccaaagtgaagctaacaagaaaatagcgcgtctattaaataataatcaggagttaaataatctacagaaattaaataatctacagaagttaaataatctactgaagttaaataatatacaggggttaaataatcctcaggagttaaataatccgcagaatttaaatgattctcaggagttaaataacagccaggaattaaatagtccacaggagttaaatgatccgcaggagttaaataattctcaggacttaaataactctaaggtgagttgtacagttagtgttgattctacgattacgggtttattaaaagaaccattgaataatgcattattagcaataaggaacgaacatctgctattaatgcctcatgtatgtgatgaaagcattagttacttactgggcgaaaaaggtatacttgaagaaatagataagctctacgcattaaatgatcacggaattgataatgacaaagtaggtaacaatgaaattaatgacatcaaagttaacctgtctcatattcttattgattccttagatgatgcaaaggttaaccttacaccggtcatcgatagcattctggagacttttagtaaatccccatatattaatgatgtaagaatactggattggtgttttaataaaagcatgcaatattttgatgatactaaaaagataaagcatgcatgctccgtaataaatcatattaatcttcgcagcgatcagtctaaaatagctgagacattatttttcaatctcgataaagaaccctataaaaatagccctgaattacaggggttgatttggaataagttggttgtatatgtcaatgaatttaacttaagtaatcgagaaaaaacaaatttaatacaaaggctatttgataatgttgagtctatatttaatgaagtacctgtcagcattttagtgaatgatatttttatgaatgatttctttatgaaaaatcctgagatgattaattggtacttccctcagttacttaagagttatgagggtgaaaagatttattttgataatttaaaatatgatttaaatgataatgataaggaatctaataaagaaattttgaagaatcaaccagataatgttatcaaagaaaaactgaataatgaatacaaacttagatttagaatgatgcaaactatcttgcaaagcagagttaatgtattaccatatattaatgaacagcgtttaaataaactaaatccaccggaaaatttacgtatagcaatagaacactttgggtggaagaatagacctatcactgcataaaataatgtgatgccgggatggtttgtatttcccggcatctttatagcgatagcaattatttactgagcgtcgcgaccatcaccgctttgatagtatgcatacggttttccgcctgatcaaaaacaatgctggcggcagattcgaagacctcatcagtgacttccataccgccatgtaggccaaattcttccgccattttcttgccaagcgtcgtttggtcgtcatgaaacgcgggcaggcagtggaggaatttgacctccgggttaccggtcaactgcatcatcttgctgttcacctgatattcacgcagcaatgcaatccgttccgcccatttctcttttgcttcccccatgctcacccacacatcggtatagataaagtcagcaccttcaactcccttcgcgacatcttcagtcagcgtaatattcccaccattttgctgtgccagggcgcggcattccgtaaccagcgcagcttccggccagcacgcttgtggcgcgaccagacgcaaatccagaccggtaagcgccgcagcttcgagcatgctattgcccatgttgttacgcgcgtcacctgcatagaccagcgtcatttcgttgaacgctttgccgggcaaatgctcctgcatggtgagaagatccgccagcagctgcgtgggatggaactcattggtcaggccattccataccggcacgctagcgtattccgccagtgtttcgacaatctcctgaccatagccgcgatactgaataccgtcatacatgcgaccaagcacgcgggcagtgtctttaatgctctctttatgaccaatctggctgccgcttgggccgagataagtaacgcgagcaccctggtcatatgcggcaacttcgaaagagcatcgggtacgagtgctgtctttttcgaagatgagcgcgatgtttttaccagtgagtttggcttcttctttaccgcttttcttatcggctttcagcttcgcggctaactgcagcaggctgttgagttcagctggcgtgaaatcgagtaatttcaggaaatgcttatgataaaacccggacatagatccctcctgtggctaacgcctcaatgaattaaaattcaatttatatggatgattattcatttgcaagtctaaagcataaatctttgtcacaaaggtggaggcaatgtcagtggtgtgtgacaataagagtatcggcaggacattaagaggaatgagccatggcaaacccggaacaactggaagaacagcgtgaagaaacacgtttgattattgaagaattactggaagatggcagcgatccggacgcgctgtacaccatcgaacaccatctttccgcagacgatctggaaaccctggaaaaagcagcagttgaagcgtttaaactcggttacgaagtgaccgatccagaagagctggaagttgaagatggtgatatcgtgatttgctgcgacatcctcagcgagtgcgcgttgaatgccgatctgatcgatgcccaggttgaacaactgatgacgctggcagagaaatttgacgttgagtacgacggatggggcacttactttgaagatcctaacggcgaagatggcgacgatgaagattttgtcgatgaagacgatgacggagttcgccactaattaagcgtagcgcatcaggcccaggtagttcctgcaacctggtgaatttgtagcccggataaggcattcatgtcacatccggcataaacaaaacgtacgttgttaatgttcgaatgcccgcgagttgaacacgcgggcatttttttagagttcgcgcaacatccgcacttcacaatcgacatggcccgtgcagccaagcgcatagtcgatatgctcaaagcccaaatgctcataaagcgcaatggcttcctttaaaaaagcggtcgtttccagatagcagcgtttgaaacccatctctcgcgcctgctccatcgccattaaggccagtttttttgccagccctttgccgcggatagccggaagaaaatacatcttttgcagttcgcaaatatcgctctcactcccggttaatggcgctatcccaccgccgccgaccacttcaccctcgtactcaacgacccaatatgcatggccaggctgactatatacttgatacagctcgtcaagattcggatcggcgacggtgtagcctttatcagcggtaagaccgtattcggcggatacctgacgaatgacgcgggcgatagcaggattatcctgcagcgtcaggcgacgcattacaggactttgcggcgcaatgttattcatagtttaacccaataaaaataaagtaattatacatttgtttaataccactctcttcttacgtacgcaagcgacttataaagtaataaagtttttgccagcctattactgataagagtattgtaacgtggcagaacattttactgtctgtatatataagttatatcaatggattttttaattcagggaatttttatggctcaagttattaatgaaatggatgttccgtcccatagctttgtttttcatggtacaggtgagaggtattttcttatttgtgtggtgaatgtgttgttaacgattataacgctaggtatctatttaccatgggcattaatgaaatgtaagcgttatctttatgctaatatggaagttaacggacaacgattttcttatggaattaccggtgggaatgtttttgttagttgtcttttttttgtttttttctatttcgcaatcttaatgacagtgagtgcagatatgccgcttgttggttgtgttttgactttgttactgttggttttgcttatatttatggcagcaaaaggactgcgtcatcaggccttaatgaccagtctcaacggcgtaagatttagttttaattgctctatgaaagggttctggtgggtgacctttttcttgccgattttaatggccattgggatggggactgttttctttatcagcacaaagatgctacctgccaatagtagtagtagtgttattatatccatggttctgatggcaatagttggtattgtttccattggtatttttaatggtactttatatagtctggtaatgagttttctctggagtaataccagtttcggtatacatcgtttcaaggtgaaattagatactacgtattgtataaaatatgccattctcgcatttttagctttattgccttttctcgctgttgctggttatattatcttcgatcaaatattaaatgcgtatgatagttctgtatatgcaaatgatgacattgagaatttacagcaatttatggaaatgcaacgtaaaatgataatcgcgcagttaatctattattttgggattgctgttagcacaagttatttaacggtgtctttgcgaaaccattttatgagcaacctgagtctgaatgatgggcgtattcgttttcgcttaactttaacgtaccacggtatgctttatcgcatgtgtgcgttggtggtgatatccgggattacgggcggtctggcttatccactgctgaaaatatggatgattgactggcaggcaaaaaatacgtatttgctgggcgatttggatgaccttcctttaatcaataaagaagaacaaccagataaaggcttcttagccagtattagtcggggagttatgccttctttaccatttctgtaagagataaaaaaggccggagcatgctccggccttcgttttcatcactgtgttttgattacagcgcggcgataacagcctgctgttcaatcagtttcgctttcgcttccgcatagccttccagcttctcacgctctttcgcgatgaccgcttccggtgcgcgggcgacaaagccttcgttcgccagtttgttctcgatacggctgatttcaccttcaatcttcgccacttctttcgccagacgcgccagctcatcttctttgttgatgaggccagccatcgggatcagcagctctgcaccgtcgatgatcttcgtaacggaaaccggacctttgtcatcggcaggcagcacggtgatactttccagacgcgccagggtttgcaggaagccacggttttcatttacgcgacgttctgcatccgcgctgcaaccacgcagcagcagctccagcggtttgcccggcgcgatgttcatttctgcacggatgttacgtaccgcaacgatcgcctgtttcagccattcggtgtcggccagtgcggcttcatcaacctgagatgcatcgtactgcgggaacggctgcagcatgatggtgtcggcagtgataccgcaaagtactttcacacgctgccagatggtttcggtgatgaacggaatgatcggatgcgcgaggcgcagcagaccttccagtacagtcaccagcgtatggcgagtaccgcgcagttctgcttcggtgccaccgttcattaccggcttggtcagctcgagataccagtcacagaactggttccaggtgaactcatacagaatgcctgcggcgatatcgaagcggaagctgtccagcgcttcgcggtacgctttgatggtctggttgaactccgccagaatccagcggtccgccaggctcagcgtcatttcgccgccgttgaagccgcaatcctgaccttctgtgttcatcagcacaaagcggctggcgttccacagcttgttacagaagttacggtaaccttccagacgcttcatatcccagttgatgtcacgaccggtagacgccagcgccgccagggtgaagcgcagcgcgtcagtaccgtgcggctcaataccgttcgggaactgcttctcggtgcgcttacggattttgtccgccagctgcggctgcatcatattgccggtacgtttttccagcagttctggcaggctaataccgtcaaccatatccagtgggtcgataacgttacccttggatttggacatcttctggccttcgtcatcacgaatcaggccggtcatgtaaacggtgtggaacggcacctgcggtttgccattttcatctttgatgaagtgcatggtcatcatgatcatgcgggcaatccagaagaaaatgatgtcgaaaccagataccatcacgctggttgggtggaactgacgcagggcgtcggtattttccggccagccaagggtagagaaggtccacagcgcagaagagaaccaggtatcgagaacgtcttcgtcctgacgcaggacaacatcagcaccgaggttattttctttacgcacttcgtcttcgttgcggccaacataaacgttacccgcttcgtcataccatgccgggatacggtgaccccaccacaactgacgagagatacaccagtcctgaatatcgcgcatccaggagaagtacatgttttcgtactgcttcggtacgaactgaatgtcgccgttctcaaccgcttcaaccgccggtttcgccaggacatcggcacgcacgtaccactggtcggtcagcattggttcgataactacgccgccacggtcgccgtaaggaacggtcaggtcgtgcggtttaatttcttccagcaggccaagcgcgtcaactgcggcaacgactgctttacgtgcagcaaaacgctccagtttctggaactctgcagggatttcgctggaataaacgtcagattcgttacctttggtatcgaacacctgggcgctttcacggatatcgccgtcaaaggtcaggatgttgatcatcggcagggcgtgacgtttacccacttcatagtcgttaaagtcgtgcgccggagtgattttcacgcagccggtgcctttttccatgtcggcgtgttcgtcgccaacgatcggaatacgacggttaaccagcggcagaatgacatatttgccaatcagatctttgtaacgcggatcttccgggttaacggctacgccagtatcgcccagcagggtttctggacgggtagtcgcgaccaccagataatctttaccgtctgcggttttcgcaccgtcagccagcggatagcggatgtgccacatgctacctttgctttcgcggttttcgacttccaggtcagagatagcggtgcgcagtttcggatcccagtttaccaggcgtttgccacggtaaatcaggtcttctttatacagacgaacgaaaacttctttcaccgcattggacaggccttcgtccatggtgaagcgttcacgctcccagtcgacggagttgccgagacggcgcatctgacgggtaatggtgccgccagattccgctttccattcccagattttgtcgatgaaagcttcgcggccgtagtcgtgacgggttttaccttcttctgcggcaatcttgcgctcaacgaccatctgggtagcgatcccggcgtggtcagtaccgacctgccacagggtgtttttgccctgcatgcgctgatagcggatcatggtatccatgatggtttgctggaaggcgtgacccatatgcaaactgccggtgacgttcggcggcgggatcatgatgcagaaactttcctggctttcatcgccattaggcttaaagtagccctgcttttcccagtgctcgtaaagcggctgttcgatatcttgtgggttatatgtcttttccattatttccaggttgccgtattcaggttgaaaccagccacgcggtaggctttatagcgttcgcgcgccagttgtttcagagaatcttcataaggaacgaagtctaccacttctgtgaaagcggtggcaaaatctgcaaagcttgttcgcagactaatcaatatatcgcgccggctgctgctacgcttttgcggccaggcgatctccaccggtgcaccgccgcgcggtccttctcccgctaaattatgcggaacaaagctttctgccggacgcgcccacagggcttcatccagccggtaagcctgcttttcatcttcacaggcgatgagcacgcgcttaccgctgcgccaacgttctgcggcaatttcacacaccagttgctcaacggcgcttaagccatcgacggtggtgtcattgtccagaaggtagaacgtcgcgtttttcataaatggggcttcttgtggtggatttaaatacgcatcaggtatacaccgcagcgcctgatgcgacgctgttgtgtcttatcaggcctacgagttcagtgctgtgtaggtcggataaggcgttcacgccgcatccggcaataacagccttgcctgacgcaattactcttcgccgttaaacccagcgcggtttaacaggaactgtgccagcaacgctaccggacgaccggtggcgccttttgctttaccagaacgccaggcggtaccggcgatatccaggtgcgcccagttgtacttacgggtaaagcgactcaggaagcaacctgcggtaatcgccccaccaggacgaccgccaatgttcgccatatcggcaaaattggactccagttgttcctgatactcgtcacccagcggtaagcgccatgcgcggtcaccggattgttcagacgcggcaatcagttcatgggccagcggattatggttcgccatcagaccagtaatatgatgacccagcgcgatcacgcaggcaccggtcagcgtcgccacgtcaatcaccgcttccggctcaaaacgctcaacgtaagttaacacgtcgcacagtaccaggcggccttcagcgtcggtgttcagcacttcaacggtttgaccggacatggtggttaacacatcgcccggacgataggctcgtccgccaggcatgttttcgcagcctgccaacacgccgataacgttaatcggcagttgtagctccgcgaccatccgcatcacgccgtaaaccgctgccgcaccgcacatatcgtacttcatctcatccatgccttcactaggcttgatgctgataccgccggagtcgaaggttaaacctttacccaccagcacgattgggcgtgcatcttcgctcgcgttgcctttgtactcaatcacgctcatcaggctttcgttttggctaccctgaccgaccgccagataggaatgcatccccagctctttcatctgctgttcgccgataacgcgggtgatgacattcttgctgtagctgtcagccagctggcgcgcttgactagcgaggtaagcggcgttacagatattcggcggcatattgccgagatcttttgctgctttaatcccggcggcaatcgccagaccgtgctggatcgcgcgctcaccgctggtcagttcacggcgggtcggcacgttgaacaccatcttacgcagcggacgacgcggttcgctcttgttcgttttcagctgatcgaaactgtagagcgtctcttttgccgtctcgacagcctgacgcactttccagtagttgttacggcctttaacgtgcagctcagtcagaaagcagaccgcttccatactgccagtatcattcagcgtattaatggttttctgaataacctgcttgtactgacgctcatccagctcacgttctttgccgcaaccaataaggagaattcgctcggaaagtacattcggaacatggtgcagcaacaatgtctgccccggttttccttccagttcgccccgacgtagcagggcgctgatgtacccatcgctgattttatcgagctgttctgcaatcggagaaaggcgacgtggttcgaagacgcccacgacgatgcaggaactccgctgtttctccgggctaccgctttttacactaaactccatgcactacgctcctgaatcttaaagacaacggcggtggctacagatagaattgcaagctttcgtaactcatgtccgctgttgcgatgacttcgtgttaatcttaacgttattacggcattggcacgtcagaacaaaatctgagaggtgaatccgttgagtataattatcttagcgacgatttcgacgactcaagagaataaatgacgtttaagccatgaaacaagctaaaatcctgcaaaagacgagtttttacgggcgtatttaaagtgataatcataagatatctggtgcgggagacgctcaaaagccagctggcgatactcttcatcttgcttttgatcttcttctgtcaaaagttagtgaggatcctcggcgcagcggttgacggcgatattccggcgaatctggtgctctcccttctcgggttgggcgtgccggaaatggcgcagcttatcctgccattaagcctgttcctcgggctgctgatgacgctgggcaaactgtataccgaaagtgaaattacggtaatgcatgcctgcggcctgagcaaagcggttctggtgaaagcggcaatgatccttgcggtattcacggcaatcgtagcggcggttaacgtgatgtgggcgggaccgtggagtagccgtcatcaggatgaagtgttagcagaagcgaaagcgaaccctggcatggcggcgctggcgcaagggcaattccagcaagcgactaatggcagcagcgtgctgttcatcgaaagcgttgacggcagcgatttcaaagatgtgttcctcgcgcaaattcgaccaaaaggtaatgcacgtccttctgtggtggtggccgattccggacatttaacccagctgcgcgacggctcccaggtcgtcactctcaaccagggaacgcgcttcgaaggcactgcattgttacgtgatttccgcattacggacttccaggattatcaggcgatcattggtcaccaggcggtggcgctcgacccgaacgataccgaccagatggacatgcgcacattgtggaacactgacaccgatcgtgctcgcgcagaactgaactggcgtatcacgttggtattcaccgtgtttatgatggcacttatggtcgtaccgctgagcgtggttaacccacgtcagggacgcgtactgagcatgctgccagccatgctgctgtatctacttttcttcctgatccagacctccctgaaaagcaacggcggtaaaggtaagctggacccgacgctgtggatgtggaccgttaacctgatttatctggctttagcgattgttctcaacctttgggacaccgtgccggtccgccgcctgcgcgccagttttagccgtaaaggagcggtgtgatgcaaccttttggcgtacttgaccgctatatcggtaaaactattttcaccaccatcatgatgacactgttcatgctggtgagcctgagcggcattatcaagtttgtcgatcagctgaaaaaagccgggcaggggagttacgacgcgttaggcgcaggaatgtataccttgctgagcgtgccgaaagatgtgcagatcttcttcccgatggcggctctgcttggggcgttgcttggtcttgggatgctggcgcagcgcagcgaactggtggtgatgcaggcttctggttttacccgtatgcaggtggcgctgagcgtgatgaaaaccgccattccgctggtcttgctgacgatggcgattggcgaatgggtcgcgccgcagggcgagcagatggcgcgtaactaccgtgcgcaggcgatgtacggcggcagcttgctctctacccagcaaggcttatgggcgaaagatggcaacaacttcgtctacattgagcgggttaaaggtgacgaagagttaggtggcatcagcatttatgcctttaacgagaatcgtcgtctgcaatccgtacgctatgccgctactgcgaagtttgacccggaacataaagtctggcgtctgagccaggttgatgaatctgatctgaccaatccgaaacagattaccggtagccagacggtgagcggcacctggaaaaccaacctcacgccggacaaactgggcgtggtggcgctggacccggatgcactctctatcagcggtttgcacaactatgtgaagtatctgaagagcagcggtcaggatgccggacgttatcagctcaacatgtggagcaaaatcttccagccgctatctgtggcggtgatgatgctgatggcgctgagcttcatctttggcccactgcgtagcgtaccgatgggcgtgcgtgtggtcaccggtatcagtttcggttttgtcttctacgtactggaccagatcttcggcccgctgacgttggtttatggcatcccgccgatcatcggcgcactgttgccaagcgccagcttcttcttaatcagcctgtggctgttaatgagaaaaagctaaccgaatgaacgaataaagggagcgaaagctccctttattattgttagcaaagtgtgcttcgttcattcctgaaaaataattaaaattcaatatattgcagtggggtgggcatgataagacgcgccagcgtcgcatcaggcaaagacaaatctcgcctgacttaccttcttctcccccccagcaaactccccaacatcccgcgtacaatctgattcgtcacttggcgagcggcgcttttggccattgtttgcaccacaccatctttcttcccgccgcgtggtccggtagtgccgaacaaaatatccttcaatccaccaagaatgccgtcatccaccgctacctctttccctttcgcgggaggattattttgctgctcggtactggcctgaaagcctttttgcaacatctcataggcggattcccggtccacctcatcctcatatttgccatacaccggagagtgattaatcaagccattacgctcatcttccgtcaccggccccatccggctacaaggcgcgatcaccatcgcacgctccaccacagaagggcttcctttcgcatccagaaaagagatcaacgcctcgccggtgcccagttcctgaatcgccttttcggtatcaaacgccggattggcccgcatggtttgcgccgctgccttcactgctttctgatcttttggcgtaaaagcccgcaaagcatgttgaacgcgattaccgagctgcccgagcacattatccggaatatcagacgggttttggctaacgaaccagacgcccacgcctttactgcgaataagccttatcacctgctcaatcttatccagcagtacctgcggggcatcgttaaacagcagatgtgcctcgtcgaagaaaaacaccagttttggtttctccagatcgcccgcttccggcaattgttcatacaactcactaagcatccacagcaggctggcggcgtacagtttcggcatctgataaagtttctcggcgctgaggatattgataacgcctttaccgttggcatcggtgcgcatccagtctttgatatccagcatcggctcaccaaagaagtgtgctgcgccttgctgttccaggctcaacagcccgcgctggatggcaccaacgcttgcgctactgatattaccgtactgattctggaaggatttggcgttatcgccgatgtactgggtaattgcccgcagatctttaaagtcgagcagtaacagcccctgatcgtcagcaatgcggaagatgatattcagcacgccagattgcacatcgttgagattcaacagtcgtgccagcaacagcggccccagatcgctaaccgtcgcccgcaccggatggcctttctcgccaaagatatcccacaccaccaccggattggcatgcggttgccagtcattgacgccgatatttttaagccttgcgagcagtttttcgctcaccgttcctgcctgcgcgacgccggtcagatcgcctttcacatcagccataaacaccggcacgccgatttcgctcaaactctccgccagtttttgcagcgtaacggttttacccgtccccgttgcgccggtaatcagcccatgacggttagccattcccggcagtaaaaacagttctgtgtccggcgtgcgggcaattaacaggggttcactcatgagatatcctccagtttcctgcctggagtataggcaacgtccggcaaagagaatacgtgtaatgaagagaaaataacttaaagcgtgttgccgtgataaatctgatacccgaggtcaacagtgttgtggttgtgatcgttatttttaattttgctcagcaacatttgggcggccatccgaccaatatcaaaacggggagtaattacgctggcgaggcttgggatcatttgcctgccaatctccagcccatgaaaacccgcaatggaaatttgttctggcacggcgaggtttcgctcgcggcacagcagaagcgcacccatcgcaatatcgtcattggtgcaaaatacaccgtctaaatccgggtttgcgctaagggcatcacgcattaactgcattcctaaatgaatggaactgatggcgcgtggattcatgcgtaatggggaaagattatgcagcatcatcgcatcgcaatacccctgataacgctgttcatcgcgggtgtcatctttggaaccgagatacagaattttgtgcctgactcgcttctccagcatggtacacaccatgtcaaaagcggcctgccgattatcaaaaccgacctccatatccagccgttctccctgtacatccatcaattccacgaccggaatggtggcactacgcagaaatttcaccgtcctgatggtgtgatatttttcgctaagtataatcccgtcaatgttataagagagcaggttaatcacgctctcttcttcggaatcgcgatcgtaattgtaattagcaataagggtctgataattatgctcagaggtgacggattctattcccgcgagaatgtcagcgaagagttgattttgaaaactcggaatcaagataccgagggtataactttgtgcattcaacaacatgccgggagcgcgattagggatataattgatctcttccataattttggcgatgcgctcgcctgtttcctttgccacctttttcgggctgcggatataacgactcacggtcatttttgttacgccagccagcgtagcgatatcctgtaaagaaattctgtgattgcgcataacttctcccaacgtcgggggaatcttcaatcttcccccgaaactacatcacaatattttattctttcagtgcaatacggcgttaatggctaacacgcccagcaaacccataatagaaataagggtttccatcaccgtccaggtacgcaacgtttcaccaaccgtcagattaaaataccctttaaatagccagaagccagggtcgtttacgtgactcgcgatcacgctgcccgcaccggttgccagtaccattaaagcgggatcggcatgggtaacgttgataatcggcaacaccacacccgcggtggtaatggccgcgacggtggcagagcccagagcgatacgcaacagcgccgcaacagtccagcacatcaataacgggctaagtgtagttccggtcattaagtgactaatatagtgcccgacaccgctatctactaatacctgcttaaacgcgccgccgccagcgataataaacacaatcatcgcgatagcgcctatagaatccccaatgatatccatgatttgctcgatggtgcgtccattacgtcggcccagtgtgaaaatcgcaataacaatggcaataaacagcgcaacggcagggttaccgacaaattcaaagaagaggcgcacggtgttagttttcggtaacgtaatttcacaaacggcggcgatagccatcaggatgaccgggatcacggcagcgaaaatactgttccagaaggagggcatctcctcttcgctaaacagatgaggattaaataagccttccggtggtgctttctcaaagcgagttagcagtttagaaaacagcggtcctgcgacaataactgtcggaatggtaatgataaatccatacagtaaagtcgttccgagattagcctcaaagatagtcgcgatggcagtaggccctggatgtggcggcagaaaacagtgggttacagagagcgctgctaccattggtacgccaacatacaacaggggtaatccactacttgctacgatggtaaataccaacggcaacagcaggacaaaacccacttcaaaaaacatggcgaggcccacaaccagaccggtgatcactagcgcccattgcacgcgttttttaccaaaagtagcaatcagcgtagtggcgatacgttgtgccgcacccgtatcagaaatcagcttgcctaacatggccccgaaaccgaggatcattgccagcccgccgagcgtgctgccgataccattttgtatagagtgcaggacggcctgtgcatccatcccttcggcaaatccgacgacggcagctaccagaacgagggcaataaagccgttaactttaaagccgatcatcaggataagaagcagcgcgacgcctgccgcaataatgattaatggcatagtctttatctcttattagtgccagaaaagcagcgctttcgcgctgcacgtaggggggctgttaaacagccactaacatgccgccatcaacaaacaacaggtggccgtttacgaaatcagaggctttactagaaaggaacaccgcagcaccaatcagttcctgcggatctccccagcgtgcggcgggggtccgtttgcacaaccaggcggtgaaggcttcgtcctcaaccagtgctttagtcatttctgttttgaaatagcccggcgcaataccgttgacctgaatattgtggcgcgccagctcgacgcacatgccgcgggtgagcatttttaccgcccctttgcttgcggcataaggggtgatggtgtcacgtcccagttcgctttgcatgctgcaaatattaataactttacctgccttgcgttcaaccatgtgacgagttaccgcttggcttaccaggaacacggcggtctggtttactgcgatcacatcattccactcttgttcagggaactcagtaaaaggatgacggcgctggataccggcgttattcaccagcacatcaatggggccgatgtccttttcgatatgttcaacggcggcatcaatttcatgtttatgagtaacattaaaaggtgcggcaacggcctgaataccctcctggtggagtttttctacagcaagttctgcgcgttcggcagtaatatcattaataattatttgtgcgccatatttacccaggccggttgccagtaaaaagccaatgccctgtgcactaccggtaatcaagatattttttcctgccagactaaatagatcgttcattgtattattcctttatttatctcttagaaaacaagctggacttttgctgcctgggttttatcaccggcgaaacgtagcgcctcttccaggtcagtgaagggatattcagcactcagtaaaggcagtggattgataacgccattcgccagccaactcactgcggtattaaattcgctggtaaaacggaaagagcctctgagactaatctccttaccaatcaacgtcatcattgggaattctgccatcgcgcctcccatacctacctgcaccattacgccgcgtgcacgagtgacctccagacaggtattcacactactaggatgaccggacacttcaaagctgacatcgaaatagcctttttccgctttccagtgatccatgtcgtcgttttgtgggtttacgagcacatccgcccccatctctttgcccaggctaagggaacggggactcacatcagcacagacaatttccgcggcccccagtgttttcactgcactgacaatcaggcagccaatgggtccaacaccggaaataaatactcgcttgccctgtaactcgccggcctgatgtgcggcatgaatcgcgacggctaaaggttcggcaaaagccataaccttttcgtcagctttggccggataagggacacattggctcgtttcgaccattttataacgggtaaaaccaccatcaacatgagggaaatacatggcactgccaaaaaaacgcatatctgtacactgattctcgttatgttcaatgcagtatttgcagtgaccgcacggtttagacggattaatggctaccgtttgcccttcatgtaattcactactgtcgctatgaataactttaccgataacttcatgacctaacaccatcggtgcctttatcatgaaattacctacttttccttcctgataataatgtaaatcggaaccgcaaattccacctcgggttatttgtactaatgttccattattattccaatctatcgtctgctcggtaacggcaacagttttcttgcccgcaacaacgcaggactgtgttttcacttgcataaattcctcactggtcaggtagacacctcggaagcatttaagcggttttaactgtcattatttgtgatgaagatcacgtcagaaaattgttacattactatgttacgcataacgtgatgtgccttgtaattcttatcagtagaaataaaaaaacgtgaaattattatgccgccaggcgtagtatcgcagcaggtaagatgattcaggagattttaaatggcgggtgaaagctttattttgatgggcgttagtgggagtggtaaaacattaattggtagcaaggttgccgcgttattatctgctaaatttattgatggtgacgatcttcatccagccaaaaatatagataaaatgagccagggtattccattatctgatgaagatcgacttccctggctggaacgcttaaatgatgctagttacagtctttataaaaagaatgaaacaggatttattgtctgtagtagtttaaaaaaacagtatcgtgatattttacgcaagggtagcccccatgttcatttcctctggttagatggcgactatgaaactattctcgcgcgaatgcagcgtcgggctgggcattttatgccggtagcgttactaaaaagtcagtttgaggcactggagcgtccacaagcagatgaacaggatattgtgcgcattgatatcaaccatgatattgccaatgtcaccgaacaatgtcggcaggctgtgctggcgatacgacaaaacagaatatgtgcgaaagagggcagcgccagtgatcagcgctgcgaatgattttcaaaaatcggctttcaacaccacgcggtaacgcgccttaccgtcgcgcacatgctggatggcgtcgttaattttgctcatcgggaacagttcggtggtcggcgcaaccttgctgcgggcggcaaaacgcatcagcttacgcagctcataaggcgtgccggtagcagaaccagagacgctgcgatcgcccgcaattaacgtaaaggccggaacagacagcggcgtgagaaccgcaccgaccgtatggaaattaccgccataggtcagcgcctcaaaatagggctgccagtcgaggctgacgttgacggtgttgataatgagatcaaactgccccgccagtgctttcagtgcctgcggatcgcggctattcaccactttatcggcacccatcgccagcacttcctgctctttcgccggattagaactaaaggctgtcacctcgcatcccattgcgtgcagaagttttatagcgatatgccccagcccgccaataccaattaccccaacgcggctggtagcagtgatatggtgcatcaacagtggtttaaagaccgtgataccgccgcacaacagcggcccggcggactcgatatcaatattttctggcagtggaatcacccattgccagtccgcacgcaacttctcggcaaagccaccgcgattcataatcgtcggcaccgcaccttgctcgcagttgatctgattaccgctaatacaggcgtcgcagtgaccacagctacgcgccgtccagccaatcccgacacgctgaccgacctgcaaacctttatcctgcgcggcgctcccgagtgccaccacgcgcccaatcacctcatgcccggcaaccagcggatattgactaaatccccattcgttatcgatcatgctcagatcggaatggcagatcccgcagtaatccacctgcacttcaacatcttgtggcctcagctcaccgggatcgtactcataaacttccagttcgccgcccgcttcttttgcggcatagctttttatcatgctcattttttggtccttctctggtgttgtttgggaagtgtagagcatggcagggcggggtgcctggagtgtgacaaaggttacacatcgctgtatgcaatgctgaaaatttcagcacttagcgaggtgcgagcaagctggcgcttgcatggtggcgtgcgacaggtataatccacaacgttttccgcatacctcttcagtgccgaagtggcgaaatcggtagacgcagttgattcaaaatcaaccgtagaaatacgtgccggttcgagtccggccttcggcaccaaaagtatgtaaatagacctcaactgaggtctttttttatgcctgaaatccagtgtttatctatctttcccgctatattaactctctcaaggtcaaccgatatcaacgtacatctaccaacatatgttggtacagatgatggtatttccggttcgataatgcttgtaccaacagggagggaatacgagaaatcacaggacattgctaatgctggtacgcaatattacctgaagctaaaaacctgcacgttagccctttgtaggccagataagacgcgtcagcgtcgcatctggcataaacaaagcgcactttgctggtctgttcccctcaccctaaccctctccccggaggggcgaggggactgtccgggcacatttttagactttgtcatcagtctgagcctgccattggcaggctctggtgtccttttacgctaccatgctaataatcagcacaataatcagcccaaccacggagttgaccagctccagcagaccccaggttttcaacgtgtcttttacactcaggtcaaagtaacctttgaacaaccagaaagatgcatcgttaatgtgggtgagggtgttggaacccgcagccgtcgccagtaccagcagcgccggattcacgccaaccagctgaccagttgctggatctaggattgcagcactgataatcccggcggcggtcatcgcgctaacgacaccctgacccgtcgccagacgaattagcacagtgatcagccatgccatgatgtaggggctgatattgccgtgggacatcaacatgccgatggtgtcgccaatgccggtgtcgatgatggtctgcttcagcacgccacccgcaccgatgatcagaatcaccattgcaatactcttcaccgcgctttcaaaagcgttcatcacccactgcatgtcatgaccacgtgcggtgccaaagagtacgaatgcaaccaccatcgcaataaacattgcaatcgggctggaaccgataaagttaaccacttcccaggcaggggtatcttttaccagccagatattggcgatggtggtagagatcataatgatcgccgggatcagcggcaccagaatgctaacgccgaaagagggcagattattcatatctaccggttgatctgctttcaggaaacttggcgttgggcgctcaagattgccgaggaacttcggcaggatcagacctgcgcagattacacttgggatcgtcaccagtacgccatagatataaaccatccccatatccgcgccataagcattcaccagcgccaccggacccggctgcggtgggaacagactatgtgcggtagtggcagctgctactgccgggatcgccagtttcaggaacggaattttagcttcggcggcaataacaataaccagcggcgctaacatgataaaggccacttcatagaacatcgccagaccaaaaatcaggccgatgataatcacgctcagctgtacatagcgcagaccgagacgcgccagcagcgtatgcgctatctggtgagccgcgccggagtcgaccatcaatttaccgatgaccgcaccgaacaccacgatgatagccagttcccccagcgtgttgccgaagcccgctttcatagtgtgcagcaggctcatcaaatccatgcccgccagcatcccgacggacagcgccgccaccaacaaagccaccatactattgattttgaacttcaaattcagtaccagcatcagaccaatgccgaataccacccagagaatgttaagcacatgcataacgttttaccttacctggttgaaccgttgttattttgggcgatatgttatgtaaattggtcaaccattgttgcgatgaatgtcacatcctctgatcaataaccatcgattaccctttgctgcaatttgcagcaacaaccatgagagtgaaattcttgtgatgtggttaaccaatttcagaattcgggttgacatgtcttaccaaaaggtagaacttatacgccatctcatccgatgcaacgccacggctgcggtctggttgttcatccggatacctaaacaactccagggttccgcgtctctttgctgtggaacccactatgtgaaagaggaaaaatcatggaacagacctggcgctggtacggcccaaacgatccggtttctttagctgatgtccgtcaggcgggcgcaactggcgtggttaccgcgctgcaccatatcccgaacggcgaagtatggtccgttgaagagatcctcaaacgcaaggcgatcattgaagacgcaggcctggtgtggtctgtcgtagaaagcgtgccaattcacgaagatatcaaaacccacactggcaactatgagcagtggatcgctaactatcagcagactctgcgcaacctggcgcagtgtggcattcgcaccgtgtgctacaacttcatgccggtgctcgactggacccgtactgacctcgaatacgtgctgccagacggctccaaagctctgcgcttcgaccagatcgaattcgctgcattcgaaatgcatatcctgaaacgcccaggcgcggaagcggattacaccgaagaagaaattgctcaggcagctgaacgcttcgccactatgagcgatgaagacaaagcgcgtctgacccgtaacatcattgctggtcttccgggcgcggaagaaggctacaccctcgaccagttccgtaaacacctggagctgtacaaagatatcgacaaagcgaagctgcgcgaaaactttgccgtcttcctgaaagcgattattccagttgctgaagaagtcggcgtgcgtatggctgttcacccggacgatccgccgcgcccgatcctcggcctgccgcgcattgtttccaccattgaagatatgcagtggatggttgataccgtaaacagcatggcaaacggttttaccatgtgcaccggttcctacggcgtgcgtgctgacaacgatctggttgatatgatcaagcagttcggtccgcgtatttacttcacccatctgcgctccaccatgcgtgaagataacccgaaaaccttccacgaagcggcgcacctgaacggtgacgttgatatgtacgaagtggtgaaagcgattgttgaagaagaacaccgtcgtaaagcggaaggcaaagaagacctgatcccgatgcgtccggaccacggtcatcagatgctggacgacctgaagaagaaaaccaacccaggttactccgcaattggtcgtctgaaaggcctggccgaagttcgcggtgtcgaactggcgatccagcgcgctttctttagccgttaatatccaccggcatggctgcgcgccgtgccggttccttcttccttgccgtcactctttgaagacggattctggagtttacgatgactactattgttgacagcaatctgccggttgcccgcccgagttgggatcattctcgtctggaaagtcgcattgtgcatctcggttgcggggcgtttcaccgcgcgcaccaggcgctgtatacccatcatctgctggaaagcaccgacagcgactggggcatctgcgaagttaacctgatgccaggcaacgaccgcgtgctgatcgaaaacctgaaaaaacagcaactgctgtacaccgtagcggaaaaaggcgcagagagcaccgagctgaaaattatcggtagcatgaaagaagcgctgcatccggaaatcgatggctgcgaaggtattctcaacgcgatggcgcgtccgcaaacggcgattgtctctctaacggtcacggaaaaaggctactgcgctgatgcggcaagcggtcaactggatctcaataacccgctgatcaagcacgatctggaaaacccgactgcgccgaagtccgcgattggttacatcgtcgaagcgttgcgtctgcgtcgtgaaaaagggttgaaagcgtttacggtgatgtcctgcgataacgtgcgtgaaaacggtcatgtggcgaaggtcgcggtactggggctggctcaggcgcgtgacccgcagctggcggcatggattgaagaaaatgtcaccttcccgtgcaccatggttgaccgcatcgttccggcggcgacgccagaaaccttacaggaaattgctgaccagctgggtgtttacgacccgtgcgccattgcctgcgaaccgttccgtcagtgggtgattgaagataacttcgttaatggtcgcccggattgggataaagtgggcgcacagttcgttgcagacgttgtgccgttcgaaatgatgaagctgcgtatgctgaacggcagccactcttttctggcgtacctcggttacctcggcggctatgaaaccattgccgacaccgtgactaacccggcttatcgcaaagcggcctttgccctgatgatgcaggaacaagcgccaacgctgagcatgccggaaggtacagacctgaacgcctatgcgacgctgctgatcgagcgtttcagcaacccgtctctgcgtcaccgtacctggcagattgcgatggacggcagccagaagttaccgcagcgtctgctggacccggtgcgtctgcacctgcaaaacggcggcagctggcgtcacctggcgctgggcgtggctggctggatgcgttacacccagggcgtggatgagcagggtaatgccattgacgtggtcgacccgatgctggcggagttccagaagatcaacgcgcagtatcagggcgcagaccgcgtgaaagcgctgctgggcctgagcggtatttttgccgatgatctgccgcagaatgccgactttgttggcgcagtgacggcggcatatcagcagctgtgcgaacgcggtgcgcgcgagtgtgtggctgcgctgtaactaactgattaccctacagacttactggtcaatcaaactgatatttggttgaccagttttcgtttttttgcccacctgtacgtgccaacttccagtgctaatggtatagtttgagattaacgggggccgtaaaattgcccgttgtaggccggataaggcgttcacgccgcatccggcaaaaatttgattaaccgcacctaacggacacaacaccatgaaatctgccacctctgcgcaaagaccttaccaggaagtcggggcgatgatccgcgatctgatcataaagacgccgtacaatcctggcgaacggctgccgccggagcgtgaaattgcagaaatgcttgatgtcacgcggacggtggtacgtgaagcgctgatcatgctggagatcaaagggctggtggaagtacgccggggtgccggtatctatgttcttgataacagtggcagccagaacacagacagtccggatgccaacgtctgcaacgatgccggtccttttgagctgttacaggcgcggcagttattggagagcaacatcgccgagtttgccgctttgcaggctacccgcgaagatatcgtcaaaatgcgtcaggcattgcaactggaagagcgtgaactggcttccagtgcgccgggcagcagcgaaagcggtgacatgcagttccatctcgctattgccgaagcaacgcataacagcatgctggtggagctgttccgtcagtcctggcagtggcgggaaaacaatccaatgtggatccagttgcacagccatctggatgacagcctgtatcgcaaagagtggttgggcgatcacaaacagatcctcgccgcgttaatcaaaaaagatgcccgagcggcgaagctggcaatgtggcagcatctggaaaacgttaagcaacgtctgctggaattcagcaacgttgacgatatttattttgatggctatctgtttgatagttggccgctggataaagtcgacgcctgacttattataataagcgcaagggtaaacgttccttgcgctttcttaaattaagaagtcgcaatgagtattactttgtaaattgcagggtattgtttagctatctgtataacctgaatgttagtactcattcttcctggtagtaaggcgagattattaaagttgccatgcagcgtccggggaagtgttgggcgctgttttttttgtttcttaataatgtgttgtaagccgtagaaggcgtgtaggtcgcaccctatgcgacctacacatcagtcaggaattacccttcacgttctaccactttaatttccaccatgccgatcccgagcttacgcgggctgtgtccgaggatattcccttcgttggtactgacaggttccggcggcacaattaccagtgtgtcggcatcggttgggttatcgaaatgcagtgtggtggtggtcacttcattgcccagcacaagagtttgttcttcattgcctacgcgtaccggaataggacggctggcgttattgccgtatgctttggcggtaatcaccaggtcaaatttcttcggcagcggatgcttgtactcgatttttacttcatcgcccagctgcgcgttggaccagcggccccagctctccggacgggaaatcccgctaaactgtttcacctcttctggcgcaccggcgacgttaaagatgaaactgtcggctttgtagcgaatatcgttatcaacaatcttcagcgtatcgacattgcctttgtaacgcgccatgtcgatgaccgtatctttaaatgccgttttgccctgccatgttgttttgtcaacatgctgaacaatttgctgaccgccaagctgcccttggctgacacaccagtcggtggaaagtgccagttccggagcccagagttgtgccatcttgtagcaacggtcaacccagacgaaattgtcgcgtggagcgaaatcggccagctggaaacgcagcggtgcactgtattcgctttccggcagcggttccacgcgtttgtcactaacccgcaacagcagcggcaaacggaaatggctaccgctgaaggcaatcatgtttttctgctggtcgatggtgaactctttcatctctttagggaatttccacaggcggatgatatctggcttccacgccaatgttttctctttgatattgaggaagatttcgctcatgctctgcccggataaactgctacgaccaagtccgagatagttatcgccaccgagaatgtccagcaccgtcgcgccgttatccatcgtgttacgcttcactgccagcgtctcttgctgcggcttgtcgccacgaatgacaaaaaacaggttattgcgatcctgcttattgaggtatttccacgccgtgttgttcatcgctaaatggtcagaagagacgacgatgacggtatctttaaaccacggactcgctttgattttgttgataaacgtcgcgatgttctcctggctgcaacttaccgcgctgaaactctgattcggtttaccgtcaaaatcatattttttgcggttacaggtacgagagataaaaccatccgggtgatgggtatcgactgtcagggtaaacagactgaatcgctgaccactgcgggaaagctcttcaaactttttccacgcttcatcgagaacggtatcgtcgtagaatccccagtcgttgcgatagtgcgggtcggctaccacgcttttcagctcttcactgccgtataagtggtcgaagccatggctcttcaggaacacatctttaccggcaaaacgcagattcgcgccctgcacgaaatagttctgataaccgctgtttttcaggatatctcccagacagatgttctgcgggaagaagctggagacagaggcggaggcgttgccttcaaagggggcaaacagcggtatgccgcactgagaagccaccatgcccgcaatcgtgtaatctgttcccggcagctgctgcgtgtggctgaaatccaggccttcatttttcaacgcgcccagttcaggcgtgagatccgggaaagcctcgttatcaaaataggtccgctcgagactttcgccgtagatataaaccaggttgagtttcgggtcagggatagttttgctcggctctttataataagccgcaaagtccgggtcgccgtcgcgactctgggatttcaccagttccgttatctgacgaaatgccgggctggcgtccacgctacccagcgccagtaagagcgccagcaggctgtaaccaaaatggtgcggatgatggcgacgacggcgcaggatccagcccagcgcaccgaacaccgctgtcagccccagcacaatgccgatacccggcaaaatgtatttgctgacgccagcaccggtcaggctgttggttaaggtatagagaaccgcgtcgttaataccatcgccagtaaaatagtcgctggcaaacagggtgatatttaaaacgacaaatagccccagcaccgttaacgtggctgcaaaccaccaggtgttacgtcccgctttccatgcgtaaatcagcacagaggcgagaaaaagggcgaaagagagtagttcactcaacgggcgatcctcactaaaccgggccgtttagccaacgtttaagctttttgagaagcacaatgtaatggcgtcgccatattgctgcaattctagtgtcaaaaaaatgcgatgttgttaggaattagtttataaacagacttttttgattacggtcacttcccgtgtaacaggggtaaaaccgtccaggagcagggaaaagggcaggagagagccgcgtcagccgggtaacagctaaaacgcggcgtttcgcggttcaggaaatgaagttcagcccctgttttaacaccagatcgcaggctttggttttcaccttttctgccagcggagttgttccgatgttatccagattgagttgctgaccatctttggttttcagcaaaccctgaatgccgtccagatagttggtgtcttctttttgctcttcactgttcaggcccagcttttccagcacctggttcttgatgttttcggcatcggttacgctcgccagcttttgcttcgcgcagtattgcagaatgcctgcggcattgttcatgttatctgcgcttaaggcctggtttccgctgctaagcaagttagttaaactcgcgaggctccaaccgccttcctgtgtcgtgctgttttggttgccaagttcgctggcggcgctggagagcgcatctttccaggacgcagcatgcaccccggtggaaattaatgcgctggcggcaatggcacagcacagaagatgtttaacagttttcatcatcattactcaaggtggaattgtgtcgcagtataccgccagaaacggggattaatactctttacctgttacccggctacggtagctatcccagttgaagatcacccacaaactgttacccaggcgcatacggtccatcacgcgttcgcccagcaacttggtcatctcttccatattactgttggtcagcatcccggttgggcgtttggaagaagagcggcgatcgacgatctggttgatgatcactttttcgtatttgctttcggtctgcacgccgatctcatcgatcaccagcagatcaacgttgctcagatcgttaagcagttgttcttcgctggtaccgctattcctgaaggtatctttcatcgcgctcataatatcggccacggtgatgatcaatacggatttaccgcgtagcagcagctcgttgcagattgccgccgccagatggtttttgccggttcctggcttaccagaaaagatgaagctggcgatgttgccgtcaaactcttcgacatactggcgcgctttgcttaacgcattcatctgcccttcacactcaacgcgatagttctcaaaggaacagttctgatgcagtggacgaataccggagcggttaaaggtgcgctgcattttcatcgcccgattttcacgttcgagagcggcggagcggatcgctccttgttctttttgccaggccagtagttcttcacccgttttgaatgcgggtttgatatgggcaggcatcattttttgcaggcgttgcatcaggtcgccaacgtttttcatcgttaccctctgaatcctggtggaatttggctgtcaggttcgctgaccgtattcacatctcgtttcggcagtccgccgttgctggcacgaccgatttgcaggctgcgcgccagtttttgttgccactgcacatggtgaaagactttaccttccgcctgccagtaggcaatgaaactggccagttcttcggtggtcaccggctctcttagcgccacgccccatagcgccgccaggcggataaaatcggcatcgggttgccagtccggatacatggcgaatttccccatgggtacagcaacgggagcggcttgcggttcctgatagagttgatcgtccagagcgacatcgcttcccggacgcgccagcttttcttccagcgccagcagttcagccaggcgtgcaggcgtgacggcataaaacgccggggcattgttagcaaatacggcaaccacaccgccttcagcttttgccagaacggtttggtgatcgtgtaccagggcgtcaataccaacgacgtccggggtcaaaactctggaagacatactgtttctcaaatatggaacgatgaacgagaagggagataacttttatagtaacacacggaggagaggaggctgtctctcatccgtgtgcttaagcgaggcaattttatacgcgagggcgcttgcggtacaaccataatccaggaatggaaagaccgatggataacgcaccaacaatgctactagctgtaagaaagttggttaacagggtaatcatcaacggttcgctgtaacctaactggctgatttttaccgcgctaatcattgcggtataagcgcttatgcccgggaacatagggataacggccgccacggtaaacactttcggatgcgccagataccagcggctccattgaataccaatggtaccgaccagcatagaagccataaaggtactccactcaatattcaacccgctggtcatcaagatcattcgggaaccatgacctatcgagccaagcagcgcacaccagcgtaacgcccgcacgggaacgttgaacaccatcgcaaagccgaccgcaggaatggcggcgaggatcatatcctgcgccaacgctaacagaaattcgatcacacccatccgcgtagcccccaaatcgtcagtgccatcactacgccgacgcaggtagccagtgtcagcagactggcgatcgcccagcgtgccagtccggtattgatgtggcctttaaacatatcggcgacggcattaatcaacggaaagcccggcactagcagcagaacgctggcggccatcgcaatggtgggggtattgctgaaagtggggagttgcaaaagcaatccggaaatggtggtggcggcgaaagcggtaaggcaaaagttgatctgtggatgaagatgacgttgtgccagcagctggcggatatacatcgcggtcgtactggcaaagaaggtgatgacggcaccatcccagccaccgttattgagtttacagaaacaggcgcaagaaaggccaaccattaaggctaccagccatcttgggtaacgtaatggctgaatttggctaaatcgtttctctacgcctttgtaatccagcagatgatgctccgcaagaatcacaatgtgctggacttcagtcaccacatgcatattaatgccgcgatcgtgatttttacgtgtgcttgtcaggcattgcccatctttaatagttgtcagcactatggcgttgctagagatagaactttcgacgctgtccattcccagtgcccgacccagtcgactggaaagctcatcaaccaacgcgctttccgcaccatgttgcaaaagaaataatccacactggatacaaagccgtgttacggctcgctgttgctcagtttgcataactcgccctttgtcatagacgtgctgcgtattgttcagataatgagaatccatttgtatcatgaagcacggttgttttgcggtaggttaagatcaaaattgcgctgattaatcctggttatcgggagaagctcggtgataaaaagcgaattatctctcgccgcaaacaaactatcacatgaatattatcatcataatgaatttattgtttggcctttacgaatcaggataatagataaccgggcacgttttttaatgttaacaagctaaaaccatcagatttcattgaataaatattggttgtgtgattttgcattctgcgggaagggatatcatttaattataaattaaatgaatgtgatttctgtttttcattaagtattcctaacaacttaatgtagatattttaaatgtctccaggctatttcaccaggttatcatttgatgctaaccttctgacacatgcagtggagttgttgtgcagcaggagtatgctgatatgaaagtgaatgctaaggataatttattcgcttaatctattaatttgctggaaacatttaaggaatgaatatcctgaataaaccatcataatttttagacagtggatgtggaggaaatatgttgccaggatgctgcaaaaatggaattgttatcagtaaaatacctgttatgcaagcagggttaaaagaggtcatgaggactcacttccctgaatatgaaataatatccagcgcctctgcggaggaccttaccttattacaattacgtcgttccggattagtcattgctgatttagccggtgaaagtgaagatccacgttctgtttgtgaacattattattctttaatcagtcaatatcgggaaattcactgggttttcatggtgagtcgctcctggtattcccaggcagtagaactgctcatgtgccctacggcgacgttattgtctgatgttgaacccattgagaatctggtcaagaccgtacgttccggcaatacgcacgcagagcgtatcagcgccatgctgacctccccggcaatgactgaaactcatgattttagctatcgctccgtcattctcactcttagtgagcgcaaggtactgcggctattaggtaaaggatggggcatcaaccagatagctagtttgcttaagaaaagtaataaaactatcagcgcccaaaaaaacagtgcgatgcgtcgactggcaattcacagcaacgctgaaatgtatgcatggataaatagcgcgcagggtgcaagagaacttaacttgccttctgtttatggagatgccgcagaatggaacacagccgaattaagaagagaaatgagccacagttaaaaaaatgcgtcatgagtagtatcggtattgagagtttattcagaaagtttgcgggtaacccttataagctccatacctataccagtcaggagagttttcaggatgccatgagccggatcagctttgcggcggtcattttttctttttctgccatgagaagtgagcgcagagagggattatcttgcctgactgaactggcgattaagtttccgcgtacccggcgtttagttattgcggatgatgatattgaagctcggctgattggtagtttgagcccaagtccgctggacggtgtattaagtaaagcgagtacgctggagatttttcatcaggaactctttttgagtttaaatggtgtacgtcaggcgaccgaccgactgaacaatcagtggtacattaaccaaagccggacgttaagcccgacggagagagaaatattgcgctttatgagccgtggctacagtatgacacaaattgccgagcagcttaaacgcaatatcaaaacgatccgtgcacataaatttaatgtgatgagcaaactgggcgtcagttctgacgcagggttgttggaggccgcagatattctgttatgtatgcggcattgcgaaacaagtaatgtgttgcatccctattaatccgcatgatgccgggtttacttccccggcagtgctttcatttcagcgtacaatcgccacattgctgcacatccggtaagcgataacgctggcagcaagtgcggcgcaccagcaggccgtcgcgcagtaccacggtacgccagagtggattatcttcaccgttcgtgagcgttttctcaaaaaagagggcatggcgcaggctttcaacagtagcctcgccgagcagttgcttcatctcagtgagataccagttgatcaaataaccggtattactccagataagtttgccgttgatctctccggtcgcttctagtgcttgcacaaccggaaccagcgcctggctgattaacgtttccattcgatgctgcgggctatgtggtgttgcgtttttatcttcacacacatcgacccagaaacaggcgacgcgtccggtttcgtgaaactcagcatggaaatgttccgggctcacatctaatgccttttcctgcgtcagtagcgccagcattaatggtggcaccatcaggccgatataccattgtgcccatagactgatcagcggtttgttctcgcggatcatcatcggttggttgcgatagatatgatcggaatagaccgccagcagagaacttagcacattcggactactccattgcgccagcgtcatggcgttaagtggggcaggttcatccaggcggataaactccagcaaatgttcacgatgttttgcgatcgtcgcccgcacggcttgcgcaagcgtgggatcctgcggctggagatgcgttcgccagatgacatcttcatagagcggtgcggaacgataggccataatcgggatagtaatctaaatgataatgattgctaatcatagcgataggtttacccgatagcaagggatttatctggcttgcaaatgataaaaattatcatatgatattggttatcattatcaatgaaagagatgaaatcatgttgcaacgtacgctgggcagtggctggggagtgttgctgccgggattgctgattgcggggctgatgtatgcggatttaagcagtgatcagtggcggattgtcattctgatgggattagtattgacgccgatgatgctgtatcacaaacagttgcggcattacattttgctaccaagctgcctggcacttattgctggcatcatgctgatgataatgaatttgaatcagggatgaaaaatcaaggaagaaacaagaaaggaagtaaagataattggtgcgaggggggggacttgaacccccacgtccgtaaggacactaacacctgaagctagcgcgtctaccaattccgccaccttcgcacagtcatcttactttttttgatatcgcctcgtttggtgcgaggggggggacttgaacccccacgtccgtaagaacactaacacctgaagctagcgcgtctaccaattccgccaccttcgcccagtgcgagcaatatcaacgtggtttttggtgcgagggggggacttgaacccccacgtccgtaaggacactaacacctgaagctagcgcgtctaccaattccgccaccttcgcataccatcaattcttaaaaagaattgctaccacggaggcgcattctagtggttttcagcttttcgtcaatagttaattatcgacagaggtgtaattgctggaaaaatgtccatcaggaaactagcgtgcaggtttggtatgcatgcgggggcagatgccagatgcgacgctggcgcgtcttatctggcctacgaagggctaacgtgcaggttttgtaggtcggataaggcgttcacgccgcatccgacacggtattcggcgagataattaacctttcttcgcctggcgggtcataatggcgcgatacaccttgaagcgccctgtttgcgcgatcacttcgtggaagccaaatgtctcatccagcacgtccggataaggcaggaaggcgttcgctacaattcgcagctcgccgccgctattaagatgacgcaccgcaccgcgaatcagcgtttgcgccgcatccaggctggtttgcatcccatcgtggaacggcgggttggagatgatcatatcaaaacgacctttcacctcggaaaagacgttgctggcaaagacttcaccttcaacaccgttggccgcaagtgttgcgcggctggcttctaccgccggggcagagacatcgcacaaggtgagacgaattttcgggctatggcgcgcaaaggcaacactaagcacgcccgcgccacagccgacatccagcactttacctttcgtgtgcggagttaacgtgctgagcagcaactggctaccgacatccagaccgtcgcggctaaacacgccaggcagcgttttgaccgtcaggccatcgacgctgtattcgccccagaatttctccgcatcaaataccggctgtttttccagacgaccaaaatagaggccacagcgacgagcgctgtcgactttattcaacggcgcataatctgccagcatctgctcggcgctgcgcacgccgctgcggttctcgccaacgacaaaaatatctgtccccactggcagcagagaaagtaaattcatcaactggaactgggcttccggtttgttcttcggccagtagtaaatcagcgtatcgcaatctgcgacgtcatccgccgtggcgaccagactgaaacgggcgttatcccccatctggcggcttaatacctgccagtggtggaattgctgggtatgagcacggctggccgcggtatctaaacgcgcgggcaggtcatcctgtaagtctccggcaaacagaatacggctttgttcgaaatcatcactgtgacgcagcaagacttcacttgccggggtaaatgcagacatggaatgctcctcaattgatactggcggcgattatagccatatgttggcgcggtatcgacgaatttgctatatttgcgcccctgacaacaggagcgattcgctatgacatcccgacgagactggcagttacagcaactgggcattacccagtggagcctgcgtcgccctggcgcgttgcagggggagattgccattgcgatcccggcacacgtccgtctggtgatggtggcaaacgatcttcccgccctgactgatcctttagtgagcgatgttctgcgcgcattaaccgtcagccccgaccaggtgctgcaactgacgccagaaaaaatcgcgatgctgccgcaaggcagtcactgcaacagttggcggttgggtactgacgaaccgctaagtctggaaggcgctcaggtggcaagtccggcgctcaccgatttacgggcaaacccaacggcacgcgccgcgttatggcaacaaatttgcacatatgaacacgatttcttccctcgaaacgactgatttaccggcggcttaccacattgaacaacgcgcccacgcctttccgtggagtgaaaaaacgtttgccagcaaccagggcgagcgttatctcaactttcagttaacgcaaaacggcaaaatggcggcgtttgcgattacgcaagtggtgctggatgaagctacattgttcaatattgcggtcgatcctgactatcagcgtcagggattgggaagggcgctgctggaacatctgatcgacgaactggaaaaacgcggcgtggcgacactatggctggaagtccgtgctagtaacgctgccgccattgccctgtacgaaagtttaggctttaacgaggcgacgattcgccgcaattactaccccaccacggacggtcgcgaagacgccatcatcatggcgttgccaatcagtatgtaatacaaggtggaataatgaagtgggactggattttctttgatgccgatgaaacgctgtttacctttgacagtttcaccggcctgcagcggatgtttcttgattacagcgtcacctttaccgctgaagattttcaggactatcaggccgttaacaagccactgtgggtggattatcaaaacggcgcgatcactagtttacagcttcagcacgggcggtttgagagctgggccgaacggctgaacgtcgagccaggtaaactcaacgaagcctttattaatgcgatggcggaaatctgcacgccgctgccgggcgcggtttctctgcttaacgccattcgtggcaacgccaaaatcggcatcatcaccaacggctttagtgccttgcaacaggtgcgtctggaacgcacgggcctgcgtgattacttcgatttgctggtgatttccgaagaagttggcgttgccaaaccgaataagaaaattttcgattatgcgctggaacaggcgggcaatcctgaccgtagtcgcgtgctgatggttggcgacactgccgagtccgatattctcggtggcatcaacgccgggcttgcgacctgctggctgaatgcacaccatcgcgagcaaccagaaggcatcgcgcccacctggaccgtttctagcttgcacgaactggagcagctcctgtgtaaacactgattgcctcccccccgttgatgggtaaaatagccgcaatttttcgttttcaacaagcgcggcgcgatgccgcttactcaagaagaaagaattatgacgttgtctccttatttgcaagaggtggcgaagcgccgcacttttgccattatttctcacccggacgccggtaagactaccatcaccgagaaggtgctgctgttcggacaggccattcagaccgccggtacagtaaaaggccgtggttccaaccagcacgctaagagcgactggatggagatggaaaagcagcgtgggatctccattactacgtctgtgatgcagtttccgtatcacgattgcctggttaacctgctcgacaccccggggcacgaagacttcagcgaagatacctatcgtaccctgacggcggtggactgctgcctgatggttatcgacgccgcaaaaggtgttgaagatcgtacccgtaagctgatggaagttacccgtctgcgcgacacgccgatcctcacctttatgaacaaacttgaccgtgatatccgcgacccgatggagctgctcgatgaagttgagaacgagctgaaaatcggctgtgcgccgatcacctggccgattggctgcggcaagctgtttaaaggcgtttaccacctttataaagacgaaacctatctctatcagagcggtaaaggccacaccattcaggaagtccgcattgttaaagggctgaataacccggatctcgatgctgcggttggtgaagatctggcacagcagctgcgtgacgaactggaactggtgaaaggcgcgtctaacgagttcgacaaagagctgttccttgcgggcgaaatcactccggtattcttcggtactgcgctgggtaacttcggcgtcgatcatatgttggatggcctggtggagtgggcacctgcgccgatgccgcgtcagactgatacccgtaccgtagaagcgagcgaagataaatttaccggcttcgtatttaaaattcaggccaacatggacccgaaacaccgcgaccgcgtggcgtttatgcgtgtggtgtccggtaaatatgaaaaaggcatgaaactgcgccaggtgcgcactgcgaaagatgtggtgatctccgacgcgctgacctttatggcgggtgaccgtagccacgttgaagaagcgtatccgggcgatatcctcggcctgcacaaccacggcaccattcagatcggcgacacctttacccagggtgagatgatgaagttcaccggtattccgaacttcgcaccagaactgttccgtcgtatccgcctgaaagatccgctgaagcaaaaacagctgctcaaagggctggtacagctttccgaagagggcgcggtgcaggtgttccgtccaatctccaacaacgatctgatcgttggtgcagttggtgtgctgcagtttgatgtggtggtagcgcgcctgaagagcgaatacaacgttgaagcagtgtatgagagtgtcaacgttgccactgcccgctgggtagaatgtgcagacgcgaagaaattcgaagagttcaagcgtaagaacgaaagccaactggcgcttgatggcggcgataacctcgcttacatcgctaccagcatggtcaacctgcgcctggcacaggaacgttatccggacgttcagttccaccagacccgcgagcattaattcttgcctccagggcgcggtagccgctgcgccctgtcaatttcccttccttattagccgcttacggaatgttcttaaaacattcacttttgcttatgttttcgctgatatcccgagcggtttcaaaattgtgatctatatttaacaaagtgatgacatttctgacggcgttaaataccgttcaatgcgtagatatcagtatctaaagccgtcgattgtcattctaccgatattaataactgattcagaggctgtaatggtcgttattcatcactcatcgcttttgtgatggcgaccattgacttctgtagagggtgaagtctctccctattcagcaatgcaacctcgtgttgccaggctcaaattacgagcaaacatacaggaataaatcgatgactatgacaagactgaagattagcaaaactctgctggctgtaatgttgacctctgccgtcgcgaccggctctgcctacgcggaaaacaacgcgcagactaccaatgaaagcgcagggcaaaaagtcgatagctctatgaataaagtcggtaatttcatggatgacagcgccatcaccgcgaaagtgaaggcggccctggtggatcatgacaacatcaagagcaccgatatctctgtaaaaaccgatcaaaaagtcgtgaccctgagcggtttcgttgaaagccaggcccaggccgaagaggcagtgaaagtggcgaaaggcgttgaaggggtgacctctgtcagcgacaaactgcacgttcgcgacgctaaagaaggcagcgtgaagggctacgcgggtgacaccgccaccaccagtgaaatcaaagccaaactgctggcggacgatatcgtcccttcccgtcatgtgaaagttgaaaccaccgacggcgtggttcagctctccggtaccgtcgattctcaggcacaaagtgaccgtgctgaaagtatcgccaaagcggtagatggtgtgaaaagcgttaaaaatgatctgaaaactaagtaattcgtcgtaattcgtcctcccgaactttgtcgggaggcgcgatgtgcaccacactaaaaatatcgcattgagtgattttcacgctcatatcaagcggtgacattaactatggtaaaggagacgcttatgtttcgttggggcatcatatttctggttatcgcgttaatcgccgccgcacttgggtttggtggtctggccggtaccgctgcaggcgcagctaaaattgtctttgtcgtcgggattattctgttcctggtgagtttgttcatgggccgaaaacgaccctaaatttcagaccattaagaaaattttatccaaagccagtccagcggactggcttttgcggttttagcgaataataaattgcgttactttgtcattctttcacaacaaaaacaggaaggcagaggtggggcagcgaatacctgtaacgcttggtaatattgcgccgttgagcctaaggccgttccagcctggacgaatagctctggtgtgcgaaggcggcggacagcgtggaattttcacggctggcgtgctggatgagtttatgcgcgcgcagtttaatcctttcgatctttatctcggcacatctgccggggcgcagaacctcagcgcgtttatctgcaatcagcccggttacgcgcgcaaagtcatcatgcgctataccacaaaacgcgaatttttcgatccattgcgctttgtccgtggaggaaatcttatcgatctcgactggctggtggaggccactgcaagccagatgccgttgcaaatggataccgccgcgcggttgtttgacagcggcaaaagcttttatatgtgcgcctgtcgtcaggatgactacgcgccgaattactttttaccaaccaaacaaaactggctggatgtgattcgcgcctccagtgcgatacctggcttttatcgtagcggagtgagcctggaaggcattaactacctggatggcgggatcagtgatgcgattccggttaaagaggcggcaaggcagggcgctaaaacgttggtcgtcattcgcactgtgccgagtcaaatgtactacacgccgcagtggttcaaacgcatggaacgctggctgggtgacagtagcctgcagccgctggtcaatctggtgcagcatcatgaaaccagctatcgtgacattcagcaatttattgagaaaccaccgggcaagctgcggatattcgaaatttatccgccgaagccattacatagtatcgcgcttggcagtcggattccggcgctgcgtgaagactataaacttgggcgtttatgcggtcgttatttcctcgccacggttggcaagctattaactgaaaaagcgccgcttacccgccatctggtgccagtggtgacgccggaaagcattgtcattccgcctgcgccagtcgccaacgatacgctggttgccgaagtgagcgacgctccgcaggcgaacgacccgacatttaacaatgaggatctggcttgatttgccgttttatcgacacccactgccattttgatttcccgccgtttagtggcgatgaagaggccagcctgcaacgcgcggcacaagcgggcgtaggcaagatcattgttccggcaacagaggcggaaaattttgcccgtgtgttggcattagcggaaaattatcaaccgctgtatgccgcattgggcttgcatcctggtatgttggaaaaacatagcgatgtgtctcttgagcagctacagcaggcgctggaaaggcgtccggcgaaggtggtggcggtgggggagatcggtctggatctctttggcgacgatccgcaatttgagaggcagcagtggttactcgacgaacaactgaaactggcgaaacgctacgatctgccggtgatcctgcatagtcggcgcacgcacgacaaactggcgatgcatcttaaacgccacgatttaccgcgcactggcgtggttcacggtttttccggcagcctgcaacaggccgaacggtttgtacagctgggctacaaaattggcgtaggcggtactatcacctatccacgcgccagtaaaacccgcgatgtcatcgcaaaattaccgctggcaagcttattgctggaaaccgacgcgccggatatgccgctcaacggttttcaggggcagcctaaccgcccggagcaggctgcccgtgtgttcgccgtgctttgcgagttgcgccgggaaccggcggatgagattgcgcaagcgttgcttaataacacgtatacgttgtttaacgtgccgtaagccggataaggcgttcacgccgcatccggcagttggcgcacaatgcctgatgcgacgcttaacgcgtcttatcatgcctacaggtttgtgccgaaccgtaggccggataaggcgttcacgccgcatccggcagttggcgcacaatgcctgatgcgacgcttgtcgcgtcttatcatgcctacaagtctgtgccgaaccgtaggccggataaggcgttcacgccgcatccggcagtcggcgcataatgcctgatgcgacgcttgtcgcgtcttatcatgcctacaggtttgtgccgaaccgtaggccggataaggcgttcgcgccgcatccggcagttggcgcacaatgcctgatgcgacgcttgacgcgtcttatcaggcctacaagtctgtgccgaaccgtaggccgtatccggcatgtcacaaatagagcgccggaaatatcaaccggctcaccccgcgcacctttaacgcatcagccaacggctcaacgtcttccggcgtggcgctcgcccagctttgcgcctcgccatacacgccgtgggcatgaaacgcgttcaggcgtaccggaacatcgccgagtcccttgataaacgccgccagttcttcgatgtgttgcaaataatccacctggccagggatcaccagcaaacgcagttccgccagcttgccgcgctctgccagcaaatagatgctgcgcttaatctgctgattatcgcgtccggtgagttgttgatgacattcgctcccccacgctttgagatcgagcattgcgccgtcgcacaccgggagcaatttttcccagccggtttcgctcaacatgccgttactgtccaccagacaggtgagatggcgcagttgcggatcgtttttgatagcagtaaacagcgccaccacaaacggcagctgggtcgtggcttcaccgccactcaccgttatcccttcgataaacagcactgctttgcggacatggctaagcacttcgtccacgctcatggattgcgccatgggcgtggcatgttgcggacacctcttcaggcaggtatcacactgctcgcaaaccacagcgttccacaccactttgccgtcaacaatctgcaacgcctgatgcggacactgtggcacgcactccccacagtcattgcaacgtcccatcgtccacggattgtgacagtttttgcagcgcagattgcagccctgcaaaaacagagccagacgactgcctggcccgtcaacgcaggagaaggggataatcttactgactaaagcgcatctgctgttcatggcttatcacgcgcggctggcgttccagaatacgagtgttgcgtgcggcttcttcgcccagccaggtggtgttggtgcgactaccttcggcgcgatatttttctaaatcgctcaaacgcaccatataaccggtaacgcgaaccagatcgttaccgctgacattggcggtaaattcacgcattccggctttaaaggcaccgaggcaaagctgtaccagtgcctgcgggttacgtttgatggtttcgtcgagcgtcagaatgtcgctgatgccggaataataataagcatgatgcggggcgacagtttgcagatgggtgatcggatctggctcatcgccatacggcaaacgcgcgcccggcgtggtgccgatatcggaactgatcccgctctgtgcgtgtaacatggcgcgtttttgccagccatatttcacgggggtattggcgacaaactccgccagttgcgcgctgatgcgataacctacttcatttgcggcggcttctttaccgtagcgcgcggcaatcccttctttttcacacagcaagttaaccgcttccgccagcccatacatgccaaacattggcacaaaacgttcagggttaatcagcccttctttcaccaggaagctattctcaaagaagtgactttgttgatagaggaattcacaccgcgcatcgatgatggcgatctgctgctggcagtagtgcggtagagtgcgcgtaaagaagtcatccaggctttcgctgcgctcggcaatggctttcaggttaaggcgtaccagcgtgctgccaccacccgccagcggcagactgttgtaacagctcacaatcccgtagcccccttttgtgaaaattttatcatgcaccggaccgttggcgatgtgcggtttgctacattcacagatgttcttcgccacttccagcagcaggtcatcaggggtgatttcaggatcgtagataaaggtcaggttcggactaacctgcttcaactctgcatctgcacgtaagatcgcgcgggtaatggggctatcagacgggccgatattggcgtgcataaaggcgtctggcagggttctgtcgaggtaacgccagaaacgttttattcgaacatcgatctcgtcttgtgttagaattctaacatacggttgcaacaacgcatccagttgccccaggtagaccggcatgcttgtgacgctcggtacgtggtggtaaagaatggtcagcagagagagtgcgtcatcaagatctttcgcgccttccagctccagccattcggaaccgttcgccagaaaacgggcgtaatcgggtaagacatagcgcggtttgtacggcgcatgaccttcaaacatatcgcagattacaccttcatccagcgcgcggcgggcttcggcaggaagctgtgggtaaggcagattgttttctgcttccagtgccagaaaatggcgcttctgctccgggctaagcactgggctggtgacaatttgctggcaacgttgttgcagtgcattttcatgagaagtgggcatcttcttttccttttatgccgaaggtgatgcgccattgtaagaagtttcgtgatgttcactttgatcctgatgcgtttgccaccactgacgcattcatttgaaagtgaattatttgaaccagatcgcattacagtgatgcaaacttgtaagtagatttccttaattgtgatgtgtatcgaagtgtgttgcggagtagatgttagaatactaacaaactcgcaaggtgaattttattggcgacaagccaggagaatgaaatgactgatctgaaagcaagcagcctgcgtgcactgaaattgatggacctgaccaccctgaatgacgacgacaccgacgagaaagtgatcgccctgtgtcatcaggccaaaactccggtcggcaataccgccgctatctgtatctatcctcgctttatcccgattgctcgcaaaactctgaaagagcagggcaccccggaaatccgtatcgctacggtaaccaacttcccacacggtaacgacgacatcgacatcgcgctggcagaaacccgtgcggcaatcgcctacggtgctgatgaagttgacgttgtgttcccgtaccgcgcgctgatggcgggtaacgagcaggttggttttgacctggtgaaagcctgtaaagaggcttgcgcggcagcgaatgtactgctgaaagtgatcatcgaaaccggcgaactgaaagacgaagcgctgatccgtaaagcgtctgaaatctccatcaaagcgggtgcggacttcatcaaaacctctaccggtaaagtggctgtgaacgcgacgccggaaagcgcgcgcatcatgatggaagtgatccgtgatatgggcgtagaaaaaaccgttggtttcaaaccggcgggcggcgtgcgtactgcggaagatgcgcagaaatatctcgccattgcagatgaactgttcggtgctgactgggcagatgcgcgtcactaccgctttggcgcttccagcctgctggcaagcctgctgaaagcgctgggtcacggcgacggtaagagcgccagcagctactaagtaagatgctttacgcctgatgcgctgcgcttatcaggcctacgagacgtatctacccgtaggccggataaggcgtagacgcatccggcaaaagccgcctcatactcttttcctcgggaggttaccttgtttctcgcacaagaaattattcgtaaaaaacgtgatggtcatgcgctgagcgatgaagaaattcgtttctttatcaacggtattcgcgacaacactatctccgaagggcagattgccgccctcgcgatgaccattttcttccacgatatgacaatgcctgagcgtgtcagcctgaccatggcgatgcgagatagtggaaccgttctcgactggaaaagcctgcatctgaatggcccgattgttgataaacactccaccggtggcgtcggcgatgtgactagcctgatgttggggccgatggtcgcagcctgcggcggctatattccgatgatctctggtcgcggcctcggtcatactggcggtacgctcgacaaactggaatccatccctggcttcgacattttcccggatgacaaccgtttccgcgaaattattaaagacgtcggcgtggcgattatcggtcagaccagtagtctggctccggctgataaacgtttctacgcgacccgtgatattaccgcaaccgtggactccatcccgctgatcaccgcctctattctggcgaagaaacttgcggaaggtctggacgcgctggtgatggacgtgaaagtgggtagcggcgcgtttatgccgacctacgaactctctgaagcccttgccgaagcgattgttggcgtggctaacggcgctggcgtgcgcaccaccgcgctgctcaccgacatgaatcaggtactggcctccagtgcaggtaacgcggttgaagttcgtgaagcggtgcagttcctgacgggtgaatatcgtaacccgcgtctgtttgatgtcacgatggcgctgtgcgtggagatgctgatctccggcaaactggcgaaagatgacgccgaagcgcgcgcgaaattgcaggcggtgctggacaacggtaaagcggcagaagtctttggtcgtatggtagcggcacaaaaaggcccgaccgacttcgttgagaactacgcgaagtatctgccgacagcgatgctgacgaaagcagtctatgctgataccgaaggttttgtcagtgaaatggatacccgcgcgctggggatggcagtggttgcaatgggcggcggacgccgtcaggcatctgacaccatcgattacagcgtcggctttactgatatggcgcgtctgggcgaccaggtagacggtcagcgtccgctggcggttatccacgcgaaagacgaaaacaactggcaggaagcggcgaaagcggtgaaagcggcaattaaacttgccgataaagcaccggaaagcacaccaactgtctatcgccgtatcagcgaataacggtatactgatctgatcatttaaatttgaagcactgagtacggagaacatatgaaacgtgcatttattatggtgctggacagtttcggcatcggcgctacagaagatgcagaacgctttggtgacgtcggggctgacaccctgggtcatatcgcagaagcttgtgccaaaggcgaagctgataacggtcgtaaaggcccgctcaatctgccaaatctgacccgtctggggctggcgaaagcacacgaaggttctaccggtttcattccggcgggaatggacggcaacgctgaagttatcggcgcgtacgcatgggcgcacgaaatgagttccggtaaagataccccgtctggtcactgggaaattgccggtgtcccggttctgtttgagtggggatatttctccgatcacgaaaacagcttcccgcaagagctgctggataaactggtcgaacgcgctaatctgccgggttacctcggtaactgccactcttccggtacggtcattctggatcaactgggcgaagagcacatgaaaaccggcaagccgattttctatacctccgctgactccgtgttccagattgcctgccatgaagaaactttcggtctggataaactctacgaactgtgcgaaatcgcccgtgaagagctgaccaacggcggctacaatatcggtcgtgttatcgctcgtccgtttatcggcgacaaagccggtaacttccagcgtaccggtaaccgtcacgacctggctgttgagccgccagcaccgaccgtgctgcagaaactggttgatgaaaaacacggccaggtggtttctgtcggtaaaattgcggacatctacgccaactgcggtatcaccaaaaaagtgaaagcgactggcctggacgcgctgtttgacgccaccatcaaagagatgaaagaagcgggtgataacaccatcgtcttcaccaacttcgttgacttcgactcttcctggggccaccgtcgcgacgtcgccggttatgccgcgggtctggaactgttcgaccgccgtctgccggagctgatgtctctgctgcgcgatgacgacatcctgatcctcaccgctgaccacggttgcgatccgacctggaccggtactgaccacacgcgtgaacacattccggtactggtatatggcccgaaagtaaaaccgggcagtctgggtcatcgtgaaaccttcgcggatatcggccagactctggcaaaatattttggtacttctgatatggaatatggcaaagccatgttctgatggatttgggcggagcgttgactccgcctttgttatgtcacaaaaaggataaaacaatggctaccccacacattaatgcagaaatgggcgatttcgctgacgtagttttgatgccaggcgacccgctgcgtgcgaagtatattgctgaaactttccttgaagatgcccgtgaagtgaacaacgttcgcggtatgctgggcttcaccggtacttacaaaggccgcaaaatttccgtaatgggtcacggtatgggtatcccgtcctgctccatctacaccaaagaactgatcaccgatttcggcgtgaagaaaattatccgcgtgggttcctgtggcgcagttctgccgcacgtaaaactgcgcgacgtcgttatcggtatgggtgcctgcaccgattccaaagttaaccgcatccgttttaaagaccatgactttgccgctatcgctgacttcgacatggtgcgtaacgcagtagatgcagctaaagcactgggtattgatgctcgcgtgggtaacctgttctccgctgacctgttctactctccggacggcgaaatgttcgacgtgatggaaaaatacggcattctcggcgtggaaatggaagcggctggtatctacggcgtcgctgcagaatttggcgcgaaagccctgaccatctgcaccgtatctgaccacatccgcactcacgagcagaccactgccgctgagcgtcagactaccttcaacgacatgatcaaaatcgcactggaatccgttctgctgggcgataaagagtaattgtgtttcgctgcaaggcgattgccttgtgaagccggagcgggagactgctccggctttttagtatctattcatttttctctccagcttgaatattttcgctatacttttcagtgaaatgtgttaataaatctattcaagtatctattcacgaatctattcattaatgagcgagctgactgatcttttactgcaagggccgcgttctgccccggaattgcgccagcgtctggcaatcagtcaggcgacgttcagtcgccttgttgccagagaagatcgggtgattcgctttggtaaagcacgggcaacgcgatatgcactgctgcgtccttatcgcggaattgagcgtattcccgtctggcgggtggacgataccggaaaggcgcataaattcgccgacatccggttgtgctggccgcagggaagttgtctggtaacaggcgcagatggcgacgaacagtggtttgatggtttgccctggtatttgaccgatctccgaccgcagggctttttagggcgcgcgtggggcaggaagttagccgcgcaactgaatctgactgatgatatacgtctctggcaggaagaagatgtgctctacgccctgaccgtatttaacggtgaatatactggcggttggttggtcggggaggggaattatcagcgatggattactgcacaacaccctgcggaaattcctctggatcaaaaactcacccattacgaacagctggcaagtgatgcactggcaggagaaattgtgggttcttctgcgggcggcgagcagccaaaatttacctactatgcacaaacgccgagtggcaataaacatgtgttggtgaaattcaccgtaccacagcaaaccgcggtcagccaacgttggggtgacctgctaattgctgaatctattgccgcgcaaatcctgcgtgacggtgggatccacgccatcgagagtacggtgcttgtaacaagtaacaggcaggtattcctcgaagcggaacgctttgactgcaaaggtaacgatggtcgcttgcctattgtgagcctggaggcggtgcagagtgagtttatctcttctccgggaagctggccgcaggcaatgcgccgtttgtgtgagcaacaacttgtcactcaccagagcgtggcgcaaacagaagtgatctgggcatttgggcgacttatcgccaacagcgatatgcacgcaggtaatttaagcttttatttatctgaaccgccatttgcgctgacgcccgtctacgacatgctgccgatggtctatgcaccaaacagcgctggaatgctgcgtgatgctgccattgaggtgaagtttgatcttaacgtcagtaaaagcgcttggttaacggcgatcccgctggcgcagcagttctggcaaacggtcgccagagatccgcgtatcagcgaggcgtttcgccacattgcgcaagaaatgccggaaaaaatccggcaaatcgaagagaaagttgcccgcatgggcgggtaattaccttacagcccccgccatccatgcgcttaactcccgtagctctttttcctgttccgggaagtcaaccaacagcgcttcgcactcctgttgcagcatatctgcgcggtacaggcagccttgcagtcgtccggcgagggcttccagcggcgcggggttgaggctgtcggtaaacacctgggcgcgggtgatatggcctttttcaacgtcgaaatgcagttccacgccgccccaggtaaagcgttcatccagcagatggctgaatgccggagcctgaccgaagttccattcccagctactctggcgggcaaaggtttcggcgaagtttggcaagtctggcgttttgttcggggagatgatttccgcttccacgcgctcgccataatgggcgaaaaaggcctcggttatggcctcgcaaacctgctcatgggtgatccccggcaacagctcggtgaggttggtcacgcgggaacgtacgctcgtaatgcctttcgccgccagtttctttttatccggattgagatagtttgccaggcggctgaggtcggcattgagtagcaaggtgccgtggtggaagccgcgatctttggtttcgcgataggcgctgccactgactttgcggtcgccttcgacggttttcaccaccagatcgttacgtccggacgcttcggcgctgacgccgagcgcgttcagcgcattgagcacaatgctcgtggagatagttttatcgtactccggcttgccagccataaaggtaaagcaggtattgccgagatcgtggaacaccgcgccgccaccgctactgcgccgcgccaggcggacgttatcttcttccatccgccgggtattacactctttccacgggttctgcgcgcgaccaattactaccgtgtcggcattgcgccagagaaacagaacgcgctgcgtggcgggcatttggcgaaaaatacactcttccaccgccaggttaaaccacgggtcgtaagagtcagagatgagcaggcgtaatgtggacataacgatttcctttcttgtagtaatgggtcactcttttttctcgctttcttcctcttccggcaccggtttgctggcggctaacaggaaggggctttgctgccagcgggtgcgtttaccctgtagcagcgtgcgggtcagcactacaccgattgccagactgagcagcaacatcaggcgtaaaatgttagtggtgttatccacctgttgggcttcggtggcgagcgtatgggtgtcgagtgtcaggcgcagatagccgagcggtccgtttttacccgcaattggctcgacaatctgctggttaaaatagccgcctgcttttttaccgtcgagcgccagccggtcgcgcacttcgacgctttcgccagaacgtgcgataagatcgccttgttcgtcatacacacccgcgtcgaggatacggctttcatccgttaactgatcgaggatcgcctgaatgcgtttttcatccggactgtcggtacgcatcagcggtgcaacgttcagcgtcacctgacgcgccagggtgcgggccagttcttccagctgtggattacgctgtcgctggtggttttgactaaaccaactcgctccctgcatcagcgccactaacaaggcaagacagaacaggacaatcactgcccgatgcagccggaatttcagttttgtgcgagccatcttccaccctttgaaaatttgagacttaatgttgccagaagcaatggatacaaggtagcctcatgcgttattttccctgcttcgaacgattttacaggagccttaatgcctaacattacctggtgcgacctgcctgaagatgtctctttatggccgggtctgcctcttagtttaagtggtgatgaagtgatgccactggattaccacgcaggtcgtagcggctggctgctgtatggtcgtgggctggataaacaacgtctgacccaataccagagcaaactgggtgcggcgatggtgattgttgccgcctggtgcgtggaagattatcaggtgattcgtctggcaggtagtctcaccgcacgggctacacgcctggcccacgaagcgcagctggatgtcgccccgctggggaaaatcccgcacctgcgcacgccgggtttgctggtgatggatatggactccaccgccatccagattgaatgtattgatgaaattgccaaactggccggaacgggcgagatggtggcggaagtaaccgaacgggcgatgcgcggcgaactcgattttaccgccagcctgcgcagccgtgtggcgacgctgaaaggcgctgacgccaatattctgcaacaggtgcgtgaaaatctgccgctgatgccaggcttaacgcaactggtgctcaagctggaaacgctgggctggaaagtggcgattgcctccggcggctttactttctttgctgaatacctgcgcgacaagctgcgcctgaccgccgtggtagccaatgaactggagatcatggacggtaaatttaccggcaatgtgatcggcgacatcgtagacgcgcagtacaaagcgaaaactctgactcgcctcgcgcaggagtatgaaatcccgctggcgcagaccgtggcgattggcgatggagccaatgacctgccgatgatcaaagcggcagggctggggattgcctaccatgccaagccaaaagtgaatgaaaaggcggaagtcaccatccgtcacgctgacctgatgggggtattctgcatcctcagtggcagcctgaatcagaagtaattgctcgcccgccatcctgcgggcggcacagcattaacgaggtacaccgtggcaaaagctccaaaacgcgcctttgtttgtaatgaatgcggggccgattatccgcgctggcaggggcagtgcagtgcctgtcatgcctggaacaccatcaccgaggtgcgtcttgctgcgagcccaatggtggcgcgtaacgagcgtctcagcggctatgccggtagcgccggggtggcaaaagtccagaaactctccgatatcagccttgaagagctgccgcgtttttccaccggatttaaagagttcgaccgcgtactaggcggcggcgtggtgccaggaagtgccattctgattggcggtaaccctggtgcggggaaatccacgctgctactgcaaacgctgtgcaaactggcccagcagatgaaaacgctgtatgtcaccggcgaagagagcctgcaacaggtggcaatgcgcgctcatcgccttggcctgccgactgacaatctcaatatgttgagcgaaaccagcatcgaacagatctgcctgattgccgaagaagagcaaccgaagctgatggtaattgacagcatccaggtgatgcatatggcggatgtacagagtagccctggtagcgtggcgcaggtgcgtgaaacggcggcttatttgacacgcttcgccaaaacgcgcggtgtggcgattgtcatggtggggcacgtaaccaaagatggtagcctggctggcccgaaagtgctggaacactgtatcgactgtagcgtgcttttggatggcgatgccgactcccgttttcgcaccttgcgcagccataaaaaccgcttcggcgcggtgaatgagctgggcgtcttcgcgatgaccgaacaggggctgcgtgaagtcagcaaccctagcgcaattttcttaagtcgcggcgatgaagtgacctccggtagcagtgtgatggtggtatgggaaggaacgcgtccactgctggtggagattcaggcgctggtcgatcacagcatgatggcgaacccacgccgcgtggcagtggggctggaacaaaaccgtctggcaatcctgctggctgtgttgcaccgtcacggtggtctgcaaatggccgatcaggatgtgtttgtgaacgtggtcggcggcgtgaaggtaaccgaaaccagtgccgacttagcgttactgctggcgatggtttccagcctgcgcgacagaccgctgccgcaggatctggtggtgtttggtgaagtcgggctggcaggggagatccgcccggtgcccagcggtcaggaacgaatctctgaagcggcgaaacacggttttcgccgggcgattgttccggcggctaacgtgccgaaaaaagcgccggaagggatgcagatttttggcgttaaaaaactctccgacgcgcttagcgtgttcgacgacttataatgagatatacggagggagatatgagcagttttgattacctgaaaactgccatcaagcaacagggctgcacgctacagcaggtagctgatgccagcggtatgaccaaagggtatttaagccagttactgaatgccaaaatcaaaagccccagcgcgcaaaagctggaggcgttgcaccgttttttggggcttgagtttccccggcagaagaaaacgatcggtgtcgtattcggtaagttctacccactgcataccggacatatctaccttatccagcgcgcctgtagccaggttgacgagctgcatatcattatgggttttgacgatacccgtgaccgcgcgttgttcgaagacagtgccatgagccagcagccgaccgtgccggatcgtctgcgttggttattgcaaacttttaaatatcagaaaaatattcgcattcatgctttcaacgaagagggcatggagccgtatccgcacggctgggatgtgtggagcaacggcatcaaaaagtttatggctgaaaaagggatccagccggatctgatctacaccagcgaagaagccgatgcgccacagtatatggaacatctggggatcgagacggtgctggtcgatccgaaacgtacctttatgagtatcagcggtgcgcagatccgcgaaaacccgttccgctactgggaatatattcctaccgaagtgaagccgttttttgtgcgtaccgtggcgatccttggcggcgagagcagcggtaaatccaccctggtaaacaaacttgccaatatcttcaacaccaccagtgcgtgggaatatggccgcgattatgtctttagtcacctcggcggtgatgagatcgcattgcagtattctgactacgataaaatcgcgctgggccacgctcaatacattgattttgcggtgaaatatgccaataaagtggcatttatcgataccgattttgtcaccactcaggcgttctgcaaaaagtacgaagggcgggaacatccgttcgtgcaggcgctgattgatgaataccgtttcgatctggtgatcctgctggagaacaacacgccgtgggtggcggatggtttacgcagcctcggcagtagcgtggatcgcaaagagttccagaacttgctggtggagatgctcgaagagaacaatatcgaatttgtgcgggttgaagaggaagattacgacagtcgtttcctgcgctgcgtggaactggtgcgggagatgatgggggagcagagataaccgtgatgaaactgctcaaaggcgaggtataaaatgagtttttttgatgagttgaaaacctctctggaagaggctgtcgagattaaacaaggtttgaaaaaacctgcacgggtgacccgccacgaaattgaggatgctaaggctgttgtagaccggaaacggtgttcacgccgcatccggcattcggtgctcaatgcctgatgcgacgcttaccgcgtcttatcaggcctacagttttacaacgtattgaaattgctggttttgtaggccggataaggcgttcgcgccgcatccggcattttacgcattacttcgcaatacgcttgtacttgatacgcttcggctccagcgcgtctgcgcccagcgtgcgtttcttgtactcttcgtactcggtaaagttaccttcgaagaactcaactttaccttcatcctggtaatccagaatgtgcgtggcgatacggtcgaggaaccaacggtcgtggctgataaccatcgcacagcccgggaactccagcagggcgttttccagcgcgcgcagggtttcgatatccaggtcgttggttggttcgtcgagcagcagcatgttgccgccaacctgcagcagcttcgccagatgcagacgaccgcgctcaccaccggagagttcaccaacgcgtttaccctgatcaacccctttaaagttaaagcggccaacgtaggcgcggcttggcatctcggtgttgccgatcttcatgatatccagcccgccggaaacttcttcccaaacggttttgctgttatccatactgtcacggaactgatcaacgctcgccagtttcaccgtttcacccaaagtgatggtgccgctgtccggctgttcctgaccagagatcatacggaacagggtgcttttacccgcaccgttcggaccgatgatcccgacgatcgctcctttcgggatgctgaagctcaggtcatcaatcagcagacgatcgccataggatttacgcaggttgctgacttccagcactttatcgcccagacgcggtccaggtggaataaacagttcgttggtttcgttacgtttctgatattcggtgctgttcagttcttcaaagcgcgccagacgtgctttacctttgctctgacggcctttagtaccttgacgtacccattccagctctttctcaatgctcttacgacgcgccgcttcttgactagcttcctgcgccaggcgctgatctttctgctccagccaggaggagtagttaccttcccacggaataccttcaccgcggtcaagttcgaggatccagcctgcaacgttatcgaggaagtaacggtcgtgggtaatcgccacaacggtgccttcgaagtcgtgcaggaagcgttccagccaggccacggattcggcatccaggtggttggtcggttcgtcgagcagcagcatgtctggtttttccagcagcaggcggcacaacgctacgcgacgacgttcaccaccggagaggttagcgattttcgcgtcccagtccggcagacgtagcgcatccgccgcacgctccagctgtacgttcagattatgaccgtcgtgagcctgaatgatctcttccagacggccttgttcagcggccagcttgtcaaaatcggcatccggatcggcgtacagcgcatacacttcatccaggcgtttcagggcgttaaccacttcactaaccgcttcttcaatggactcacgcacggtgtgttccgggttcagctgcggttcctgcggcagataaccaatcttgatgtctggctgcggacgcgcttcaccttcgatgtctttatcaatgcccgccataatgcgcagcagggtggacttacccgcgccattcagacccaggacaccaatttttgccccagggaagaaactcagagagatgtttttcaaaatatgacgtttcggcggaacaactttgccgacacgatgcatggtataaacgaattgagccacgttggacttcgcctctatgtttatcgtgataatgagttttcaaaggcgaagtgtagcctttttccccgcctaatcccagccggtcgatcaccctcgcagtaaaagtaaaaaagtgtccgtaacgtggcgtaaacggcaatgactggttagcataaatctattacgcggcatgacgctgcattgatgtatttacacttagaggatgcgcttgtggaaaaagccaaacaagttacctggcggctgttggctgccggtgtctgtctgctgacggtcagcagcgtggcgcgagccgacagtctggatgagcagcgtagtcgttacgcgcaaatcaagcaggcctgggataatcgacaaatggatgtggtcgaacaaatgatgcctggactgaaggattatccgctttatccctacctggaataccgccagatcaccgatgatctgatgaatcaaccggcggtgacggtcactaactttgttcgcgctaaccccacgcttcctcccgctcgcacgctgcaatctcgtttcgtcaatgaactggcgcggcgtgaagactggcgtggcttgttagcctttagcccggaaaagcccggaactaccgaagcgcaatgtaattactactatgcgaaatggaacaccgggcagagtgaagaagcctggcaaggggcgaaagagctgtggctaaccggcaagagccagcctaacgcctgtgacaagttatttagcgtctggcgtgcgagtggtaaacaagatccgctggcgtatttagagcgtatccgtctggcgatgaaagcgggtaacacaggcctggtaacagtgctggcagggcagatgcctgccgattaccagactatcgccagcgcaatcattagtctggcgaacaaccctaatacggtactgaccttcgcgcgtacaactggcgcgaccgattttacccgtcaaatggcggcggtggcgtttgccagtgtggcgcggcaggatgctgagaatgcacggctgatgatcccaagccttgcccaggcgcagcagcttaatgaagatcagattcaggagctgcgcgatatcgtcgcctggcgtttgatgggcaacgatgtcaccgacgagcaggcgaaatggcgcgatgacgccattatgcgcagccaatctactagccttattgaacgccgtgtacgaatggcgcttggcaccggcgatcgtcgcggcctgaatacctggctggcgcgtctgcctatggaagcgaaagagaaagatgaatggcgttactggcaggcggatttattgctggaacgcggacgtgaagctgaagcaaaagagattttgcatcaactcatgcaacagcgtggtttctacccgatggttgcagcacaacgcatcggcgaagagtatgagctgaagattgataaagcgccgcagaatgttgacagcgccctgactcaggggccggagatggcgcgcgtgcgcgagttgatgtactggaatctcgataataccgcgcgtagcgagtgggccaatctggtgaagagcaagagtaaaacagagcaggctcaactggcgcggtatgctttcaacaaccaatggtgggatcttagcgttcaggcaacgatcgccgggaagctgtgggatcatctggaagagcgattcccgctggcttacaacgatcttttcaagcgctacaccagcggtaaggagatcccgcaaagctatgcgatggcgattgctcgtcaggagagcgcctggaatccgaaagtgaaaagtccggtaggggccagcggcttgatgcagattatgcctggtacagcgacccatacggtgaagatgttctctattcccggttatagcagtcctgggcaattgctggatccggaaacgaatatcaacattggcaccagttacctgcaatatgtttatcagcagtttggcaataatcgtattttctccagtgcagcttataacgccggaccagggcgggtgcgaacctggcttggcaacagcgccgggcgtatcgacgcagtggcatttgtcgagagtattccattctccgagacgcgcggttatgtgaagaacgtgctggcttatgacgcttactaccgctatttcatgggggataaaccgacgttgatgagcgccacggaatggggacgtcgttactgatccgcacgtttatgatatgctatcgtactctttagcgagtacaaccgggggaggcattttgcttcccccgctaacaatggcgacatattatggcccaacaaagtccctatagtgcagcgatggcagaacagcgtcaccaggagtggttacgttttgtcgacctgcttaagaatgcctaccaaaacgatctccatttaccgttgttaaacctgatgctgacgccagatgagcgcgaagcgttggggactcgcgtgcgtattgtcgaagagctgttgcgcggcgaaatgagccagcgtgagttaaaaaatgaactcggcgcaggcatcgcgacgattacgcgtggatctaacagcctgaaagccgcgcccgtcgagctgcgccagtggctggaagaggtgttgctgaaaagcgattgattttgtaggcctgataagacgtggcgcatcaggcatcgtgcaccgaatgccggatgcggcgtgaacgccttatccgtcctacaaatacccgtaatttcaatatgtttggtaggcatgataagacgcggcagcgtcgcatcaggcgcttaatacacggcattatgaaacggactcagcgccaggatcaccgcctggtgatagacgctggcgcgagtgagtttcccggcggtaaacacgccgatcgccccttccttacgaccaatctcatcaataccggtataacggctcatcacgggaccaagcgcctcaccttcacgcactttttccagaatcaccgcaggcaacggcaaagtagcgctacgcgcctcgccgcgctggctggcgttttcaatcaccacccaactgaaagtgctgtcaccatcgatgccagcttcaatcgccacccaaaaatcagcctctggaagtaaacggcgggcattggctacccgatttcgtgcgccagcgcgcgtttcctcactgccaaagggctgttccggtacaccgctctcgacggcaacggatgcaatatggcaggatccttcgccgaagatctcgtgaaatgcctgcagaatggcctgaattttagcgggattggtggtcgcacagacaacttggtgcataatcagcattactcagaaaattaacgttacagcagtatacggaaaaaagcatgttacaggtatacctagtccgccacggtgaaacgcagtggaacgccgagcgacgtattcagggccagtctgacagcccgctgaccgccaaaggtgagcaacaggcgatgcaggtggcaacccgtgccaaagagcttggcattacgcatatcatcagtagcgatttaggacgcacccggcgtacggcggaaatcatcgcccaggcctgcggctgtgacatcatctttgattctcgcctgcgtgaattaaacatgggtgtgctggaaaaaagacatatcgattctctgaccgaagaagaagagaactggcgtcggcagctggtcaatggcaccgttgacgggcgtattcctgaaggcgagagtatgcaggagctcagcgatcgcgtcaatgcggcactggaatcttgccgggacttaccgcagggaagccgaccgctgctggtgagtcatggtattgcactgggatgcctggtgagtacgattctcggattaccagcatgggcagagcgccgcttacgtctgcgtaactgttctattagccgcgtggattatcaggaaagcctgtggctggcgtctggctgggtcgttgaaaccgcaggggacatcagccatctggacgcccctgcattagatgagctgcagcgttaacgacggatcggaatcagcagttcacagcgtagattaattgggcgatctcccgctttggcatcttctgccgggtagtatcgctcaatatcctgacctttacggcgcgtcaggttgagcattggcatgcacgttccgtataccgtcaggataaactcctgcacgccggttcccagaccttcataggtaaacatcacatattcgccgccctgcagcatcaccggatgccccgtcagtacatagccatctgcctgatcctgggctaacgcggtggtatagaatacctcttgctcgtcgtctttatcctgactcggacgcgtttcattcaggccgtagagcaccggcggaatggtcggcgcgttgccgagaaaatcgtgccagaactgataacgcatttcatggcggaaatcagagatttgctccaggctacaggagtagctctgggtaacaccaatcagcggcgtatcttccagggtgacaaatttgtgctctggcatagtgaattcacccaggcgtagcggcgggcgaataccaaaggcgctccattcaggagaacggcggtaaagtgcaggagtctgggcaaactgcttcttgaatgcgcgggtaaatgtctgttgagagtcgaagcggtattgcagcgcgatgtccagaatcggacgcgcagtcaggcgtagtgcgaccgcgcttttgctcaaacgacgagcacgaatatacgcgccaatagcatggccagtgacatctttaaacattctctgtaagtgccacttggaataacctgctttcgccgctacattgtcgaggctcaggggctgatccagatgaccttccagccagattaaaaggtcgcgaataatgccggcctgatccataaaatatcctcatcctttcaacaacgagcacctgacatcaggtaattggataatagcattttttgctgttttagcattcagtgtttttttcttagtagagtatgttttagggcttgacggaaataaaagtattgagattttgttcttaatcaatatgttatttaccgtgacgaactaattgctcgtgtaatagataaaaatggtaacaatatgaaatacaagcatttgatcctgtctttaagcctgataatgctggggccattggctcatgcagaagagattggtagcgtcgacaccgtatttaaaatgatcggcccggatcacaaaattgttgtggaagcctttgatgatcccgatgtgaaaaatgtcacctgttatgtgagccgggcgaaaaccggtggtattaaagggggattgggtctggcggaagatacctccgatgcggccatttcttgtcagcaagtcgggccgattgaactgagcgatcgtattaaaaacggcaaagctcagggcgaggtagtattcaaaaaacgcacgtccctggtctttaagagcttacaggtcgtgcgcttttatgatgccaaacgcaacgcgctcgcttatctggcttactccgacaaagttgtagaaggtagcccgaaaaacgcgattagcgcggttcctgtcatgccgtggcggcaataacagaggcgatttatgcaacgggaaacggtctggttagtggaagatgagcaagggatagccgacacgctggtctacatgttgcagcaggaaggttttgccgtcgaggtctttgagcgaggcttgccggtgctggataaagctcgcaagcaggtacccgacgtcatgattctcgatgttggtctgccggatattagcggctttgaattgtgccgccagttactggcgctccatccggcgttacctgtactgttcctgacggcccgaagtgaagaggtcgatcgcctgcttgggctggaaattggtgctgacgactacgtggctaaaccgtttagtccccgcgaagtgtgcgccagggtgcgcaccttactgcgtcgggtgaagaagttcagcacgccgtctcccgtcatccgtattggacattttgaattgaatgaacccgcggcgcagatcagctggtttgacacgccattagcgctgactcggtatgagtttttattgttgaagacgttactcaagagtccgggccgcgtctggtcccgccagcaactgatggatagcgtatgggaagatgcgcaggacacctacgatcgcaccgtcgatacccacattaaaacgctgcgtgccaagctgcgcgccatcaaccccgatcttagtccgattaatactcatcgcggcatgggatatagcctgaggggcctgtaatgcgtatcggcatgcggttgttgctgggctattttttactggtggcggtggcagcctggttcgtactggccatttttgtcaaagaagttaaaccgggcgtgcgaagagcaacggaggggacgttgatcgacaccgcaacgttgctggcggagctggcgcgtcccgatttgctctctggggacccaacgcatgggcaactggcgcaggcgtttaatcagctacaacatcgcccgtttcgcgccaatatcggtggcattaacaaagtgcgcaatgaatatcatgtctatatgaccgatgcgcagggcaaagtattgttcgatagcgcaaataaagccgttggacaggattatagccgctggaatgacgtctggctaacgttgcgtggtcagtatggtgcgcgcagcacgttgcaaaatcctgccgatcccgaaagttctgtgatgtatgttgccgcaccgattatggacggcagccggcttattggcgttttgagcgtaggcaaaccgaacgcggcgatggctccggtcattaagcgtagcgagcggcgaattttatgggccagcgccattttgttggggattgcactggtgattggcgcaggcatggtttggtggatcaaccgctctattgcccggctcactcgctatgctgattccgtcactgacaataagcccgttcctctccccgatctcggtagtagcgagttgcgtaaactcgcgcaggcgctggaaagtatgcgcgtgaagctggaagggaaaaactatattgagcagtatgtttacgcattaactcatgagctaaaaagcccactggcggcgattcgtggagcggcggaaattttacgcgaaggtccgccgccggaagtggtggctcgttttactgacaacattctgacgcaaaatgcgcgtatgcaggcattggtagaaacgttactacgccaggcaagactggagaatcgtcaggaagtcgttctgactgctgttgatgtggcggcattattccgccgcgtcagcgaagcgcgcaccgtgcagttggcagaaaaaaaaatcactctgcatgttacgcccaccgaggttaacgttgctgctgaaccggcgttactggagcaggcgctgggaaatttactggataacgccatcgattttacccccgagagcggttgcatcacgctaagcgccgaagtggatcaggaacacgtcacgcttaaggtgctggataccggtagtggtattcctgactacgcgcttagtcgtatttttgaacgcttttactctttgcctcgtgcaaatgggcaaaaaagcagcggtctggggttggcgttcgtcagtgaggtcgcccgtttgtttaacggcgaagtcacgctgcgcaacgtgcaggaaggtggcgtgctggccagccttcgacttcaccgtcacttcacataacttcaaattcttcccacatagtcttcgtatcctgctgccattgcaaaggagaagactatgttgaaatcccccctgttctggaaaatgactagcctgtttggtgcagtattgctgttgttgattccgataatgctgattcggcaggtgattgtcgaacgtgctgattaccgtagcgatgtggaagatgcgattcgccaaagtaccagcgggccgcaaaaactcgttgggccgctcatcgctattcctgtgaccgagctttatacggtgcaggaagaggataaaaccgtggagcggaaacgaagttttatccatttttggttacctgagagtttgatggttgatggcaatcagaacgtggaagaacgcaagatagggatttataccggtcaggtctggcacagtgatttaacgttaaaagccgatttcgatgttagccgtcttagcgaactcaacgcgccaaatatcaccttaggcaagccatttattgtgattagcgtcggggatgcgcgtggtattggtgtggtgaaagcgcctgaagttaacggaacggcgctgaccattgaacccggcaccgggttagagcaaggcgggcagggcgtgcatatccctttacctgaaggggactggcggaagcagaacctgaagctgaatatggccctgaatttaagcggtaccggcgatctttctgtggtgcctggcgggcgtaatagcgaaatgaccttaaccagcaactggccgcatcccagttttttaggtgattttctaccagccaaacgggaagttagcgagagtggttttcaggcgcactggcaaagcagctggtttgctaataatctcggtgagcgttttgctagtggcaatgataccggctgggaaaacttcccggcgtttagcgtcgcagtaacgacgccagccgatcaataccaattaactgaccgggcgactaagtacgccattctgctgattgcactgacttttatggcgttctttgtttttgaaacgctcaccgcgcaacgtttacacccaatgcaatatttgctggtggggcttagtttggtgatgttttatttgctcttgctggcgctttctgaacataccggttttaccgtggcatggataatcgccagtctgattggggcgataatgaacggtatttatttgcaagcggtattgaaaggttggtgcaacagcatgttgtttaccctcgcgctgttgttgctggatggtgtgatgtggggactgctcaactctgccgatagcgcgctgttgttgggaaccagtgtgctggtggtggcgctggccggcatgatgtttgtgacccgtaatatcgactggtatgcgtttagtctgccgaaaatgaaagccagtaaagaagttacaacggacgatgagttacgtatctggaaataaggttgaaaaataaaaacggcgctaaaaagcgccgttttttttgacggtggtaaagccgattaatcttccagatcaccgcagaagcgataaccttcaccgtgaatggtggcgatgatttccggcgtatccggcgtagattcgaaatgtttacgaatacggcggatcgtcacgtctacagtacggtcgtgcggtttcagctcacggccggtcattttcttcagcagttcagcacgggactgaattttgcctgggttttcacagaagtgaagcatggcgcggaactcgctgcgcggcagcttgtactgctcgccatcagggccgatcaagctacggctgttgatgtccagttcccaaccattgaacttgtagctttcaacgctacgacgttcttcgctgacagtacccagattcatggtacgggacagtaggttgcgtgcacgaatcgtcagttcacgcgggttgaacggtttggtgatgtagtcatctgcaccgatttcgaggccgagaattttatcgacttcgttgtcacggccagtcaggaacatcaacgcaacattcgcctgctcgcgcagttcacgcgctaacagaagaccgttcttacccggcagattgatatccatgatcaccaggttgatgtcatattcagagaggatctgatgcatttccgcgccatctgtcgcttcgaaaacatcatagccttccgcttcgaaaatacttttcaacgtgttgcgtgttaccaactcgtcttcaacgataagaatgtgcggggtctgcatgtttgctacctaaattgccaactaaatcgaaacaggaagtacaaaagtccctgacctgcctgatgcatgctgcaaattaacatgatcggcgtaacatgactaaagtacgtaattgcgttcttgatgcactttccatcaacgtcaacaacatcattagcttggtcgtgggtactttccctcaggacccgacagtgagtaaaacggctgtcatcctaaccattttaacagcaacataacaggctaagaggggccggacacccaataaaactacgcttcgttgacatatatcaagttcaattgtagcacgttaacagtttgatgaaatcatcgtatctaaatgctagctttcgtcacattattttaataatccaactagttgcatcatacaactaataaacgtggtgaatccaattgtcgagatttattttttataaaattatcctaagtaaacagaaggatatgtagcattttttaacaactcaaccgttagtacagtcaggaaatagtttagccttttttaagctaagtaaagggctttttctgcgacttacgttaagaatttgtaaattcgcaccgcgtaataagttgacagtgatcacccggttcgcggttatttgatcaagaagagtggcaatatgcgtataacgattattctggtcgcacccgccagagcagaaaatattggggcagcggcgcgggcaatgaaaacgatggggtttagcgatctgcggattgtcgatagtcaggcacacctggagccagccacccgctgggtcgcacatggatctggtgatattattgataatattaaagttttcccgacattggctgaaagcttacacgatgtcgatttcactgtcgccaccactgcgcgcagtcgggcgaaatatcattactacgccacgccagttgaactggtgccgctgttagaggaaaaatctagttggatgagccatgccgcgctggtgtttggtcgcgaagattccgggttgactaacgaagagttagcgttggctgacgttcttactggtgtgccgatggtggcggattatcctagcctcaatctggggcaggcggtgatggtctattgctatcaattagcaacattaatacaacaaccggcgaaaagtgatgcaacggcagaccaacatcaactgcaagctttacgcgaacgagccatgacattgctgacgactctggcagtggcagatgacataaaactggtcgactggttacaacaacgcctggggcttttagagcaacgagacacggcaatgttgcaccgtttgctgcatgatattgaaaaaaatatcaccaaataaaaaacgccttagtaagtatttttc
